United States Patent Application Publication US 2026/0191916 A1 - sequence listing, part 2

SEQ ID NO: 1 - DNA, 3126624 bp, Ruminococcus sp. (residues 1,563,313-3,126,624 of 3,126,624)
  source 1..3126624: mol_type = genomic DNA
cggttacattggtaatctcctttacagggagcatctcaatcgatttttcatggactgctcttgcagcttttttcaaatccaattccgcttcaatcggaatgacaaatacataatgcgttccacttttaccggttgtgacaagtgttttgtatacgcgctcatgaggaagtccgagacgatctgcggtatggattccatctgtaaaattctcacattcataggtctgatattgataagaaattttattgcggtctaaaatgcgcatagcgttggtttttaattcctttttactcaacgtgttcacttctttctgttgatttttcagttttggcacggacgcattcgtgaagtggacgccgcacctttttgcgggttacttccaccagttgcagtgctgtgacatcgattacggatgtctggattggatcttctgaaagaaaccggcggaattgttttaaaagttcctgcatcatgtcaggatcgtccatattgataaagtcgatgaggatgatcccggaaatgttgcgaaggcgaatctgtctggctgcttcttttgccgcttccagattgatttttaaataagtttctgcgcttttcttttttgtttttgcagaaaatttcccggaatttacatcaaccacagtcagtgcttccgtcggttggatgacaagataagcgccgtttttcagccagacatactctttgagggcacgctctacggcgatatctgtactgtaaagtttggaaagtggaagcagctgctcctgataaaactggagtttggaaagatcttccggctgctccgcctgcagaaacccgtgaatctgctgatacaatttcggatcatcggtaatgatggccgataatccgtctgtatatacatttttcaaatctgtgatataggaaggaagtgcctcctgcaggcaggaaaaacaggtacgaaaaggggctgtttcttttaattttacataagcgctttctagtttttgaatttcttcaagcactgtttcaaacgcaacatcttttgcgttggtacggatgatcagtccgtagtcttcatttttgagatagcttaatctttctttataatcctctctgattgaccgcgaaagtttcccggaagtaccgattcgggtgtttcccgttgtcagcaccgcatatcgtcctgtaaaattgatattgctgctgacagtcggcgcttttgtcttgacagcttctctgctgatctggacaaccagctcgtctccgatacaaagcggtttctttcctattttgtgggtgaaaattgcctgagaggcctggctcaagtcataatagcattcttttccgggcaaaatctcaatgaaagcagcaccgatatttgcagcgatattttttacttttccgatataaatgtctccaagtaccggctggcggtgctgctcagaatctggaagagcgcagtgtatttctgcaattacatcatcttccagaagaaatgtccagattttcccctcttttttcagcattaaaatttttcgtactgccatatgtaatacctctcttttttatactgtataaatactgcagattttattctatcacagtgccgagagactccagacttaccaggttgtgagtgttctcatctcccagatcagcgtacagttccagacgacacaatgtaaacttcaattgcgaagcgtctgcacctaaaaattgacagaatgcttccataacaagtcccggttttaaattctcaacacttccggcagcaagctgcataaaaagcttgtgatcctgcatttccatccggtagattaaaggtttgatatcgacctctttttcgctgcgttttgtctgttttaaaatacggatttcagattgtgacaaaaaggcgtctatctgtgattcccagttttgaggaagagttttggaagtaatatcaagcagataatctgctgctgcaacgatcgccattccggtcattttcttttcttcggcaatctgacggaaacttaatacttccattccttcgaccataacttcatttaaacgggcaacggcttcctgactggatatggactctttgagttcaatatcaaaatattctccttcgcttgtgattccaattcccagagggtttgcaaaggacatgatcatatgagggctatatccttctgtataagcaattggaatatgtgctctgcggattgccttctggaagaatcgcatgacatccagatgtccgataaagcgaagtgctccatattttttaaatttaattcttgccttcaaaacagacacctcctccaaattttgctgcaccacatccggaacactgcattctgcagtttggagtgacttgtgcattcattgctctctcccattcttttttcaggaaattttttgttacaccgatatcaatgaaatcccaggggaagagttcatccatggagcgttcacgcaaagtatagaatgcaatatccactccggtatttgcaaaagctgtcatccatttctcattatcaaagctttcgctccaggagtcatacagacatccgagacggtacgcttcttcgatgacttttccgacatttctgtctcctcgggcaaacaccccctctaatacagtgacatctgcttcatgccagttatatttcagactcttcttgttcagctgctgcaaaaattcatgttttacgatcatggcacggcggatatactcttcgcttagaaacatctttgcccactgaaacggggtgaatggtttcggaatgaaaaaggaagagctggctgtaatctgacatttcccattgcgttgttctttcggaatctcataatatcttctggcaactttttccgccaggtgcgcaatggctttcatatcttcttcggtttctgtaggcagtccgagcatgaagtacagttttactttgttccatcctccttcaaaagcctgtccggcaccttctaaaatgatatcttctgtcagccctttattgatcacatcacgcattctctgggaaccggcttccggagcaaaggtgagactgctctttttgacatcctgaaccttgctcatcacatccaaagaaaatgcatcaattcgaagggatggaagggagatattgattccttctcctttgaattcatcaataaggaaggtgacgagttcttttaattccgaataatcgctggagcttaaagaacttaaagaaatttcttcgtgtccggtattttcaagcatggctttcgcatactgttttaaacggtctacgtttcgctccctggttggccgatataacatacccgcctgacagaaacggcatccacggatacaccctctttgaatttctaacacaacacgatcctgtgttgctttgatgaagggaacaacaggcgcctgtggatatggagcatcggttacatccagtaccatctgctttttgatgacagcaggtgcgtgttcgttgtttggggtaaaggaagcaagagttccgtcctcatgatatgtggcatcataaaacataggtacgtacaagccttcaatctgtgcagcttgttctaaaaattcaagtctgcttttccctgacgaccgatattctttatagatgtctagaagttcatcatagaccgtttctccttctccgatatagaaaatatcaaagaattcagccaatggctctgggttatacgtacatggaccaccaccgattacgatgggatcattttcaccacggtcacaactgtgtattggaatctgactcagatccagaatctgcagaatattggtgtagcacatttcatattggatcgtaatcccaagaaaatcgaaatcccggatgggatcctgggattccagtgcgaatagcggaatctgttcttctttcatgatcttatgcagatccagccacggagaatatactctctcacaccagacgtcctctcttcggttgaacatatcgtacaggatctgaattcccaggtgtgacatcccgatttcgtacacatcgggaaaacacatcgcgaacctaatatccactttttctgggtctttcatgacactattgacctcgttcccgatataccgggcaggtttctcgatatttagtaatatttcatcatttaatgcaagttttctcatatatttcctttctatttttgtatatatttcacaaattcttccgaacctgtttttgacttttcaaagtgaaaaatcgatattttttatgttgtttttcgtatgtaaaatttgctgattttatgtgtttttcgctcaaaaatccggtttggtcatttttctcatatttcccttactatttatcactagaaaacaccatgcataattatacaacattacagaagtatctgatatgtgattgaactcatccaatctacaccattatatacattttagggaagaacttcaagcaaatatctttcgtcaagcggaatcaattgtgcggcgttattcttaggcaaaacctctaaagcaaaggcgattatttcgcagtcggcattgtatacaactctttccgtattaacatatatttcttgggtaaaatcggctgaataatgccctaagcttgcagcaatagccttcatgcttatttcaaattctgccaaaatagttgcgtatgtattgcgcaattttctccagggtatttttgtaaaaccacatttttttattaaccttgtatatgcatttttgacaaaacttcgatcgtatggtttaccatcgtcctgacagcacaaatatccatagtcatgaaagtctgggatatttgcacgcaattcttcatatttttgtctttgaagtataatttcgtcaataacaaagtcagccagcggggtgcatcgaacactgtttctggtctttgttcgcagttcttgtgtaagaagtttaccatcttccaacctttcgttttttgtgcttctccctaactgacgttcaatataaatttcatgattgccaaaatcaatatcttcatacttaattgcaataatttctgatatgcgtaagcctgctgtcagtgccaacaataatgctataaaaattttaggttcttcttgtttgcataggtataacattattgtaacctgctgaagcgtataaactgccggtaaagacggaggttgatcaacaggttctaccttcttattctctatttcagcctttttctctgtttttcgttttacttttattgcagattttacaggattcaaataaataatatgattctccaatgcgtattgaaaagatgcgccaacaacaccatatgcacttctcaatatagacttataggggatactatcgaacgctgcaatcaaatcatctctctgtatagatgcgatttttttatccccccagactaccagaaaataattatatatgatattccgatatgccgtaaatgtattgtatgtaatgtcaatttcatcaatcatataatagtaaagccaataatcaaaaaattctctggctgtatattcaaatgatacaaatgttttttcatgcagttgtgcgattgcattttcccttgcttttatcgcctctgttttagaaacaaatccgcctctttgcattggacagacttttcctgattcaaaaacaatttcaaaacgaaaacagtattttttccgagctttgacataagttacactatcactgaatttccatgaaataattttaccgtagaagaaagtttcactgaccggaggttttatgataggttttacacgcatactatccctcctttgcttcgaactttgacggcaccaattgccggatccattacagaatcaatagtttttgctatttctttcttcgcttccatgattccacaatagatttcaaatgttgtagctacacttttatgtcccattaattttgatatcttttccaatgaaacaccctgctcgatcagtatcgtagcaaacatatgacgaagcccatgcattgtaatgtgtggaagtccattgcgtttgcaaattctttttattgcttcagtgtaagttccatctgactttatatttccctttatgccaagacagatatattcagcccattcatgattttctgtaagtttgagaatttcttcattttcctttttccttattttcaattcatcaaaaataaaagctgaaatgatcaatgttcgatagctgctataagattttggcggttttgtggataatctttgagtagcgattttgtatgtacgatcctcttcaataactacatcgtaatcacgtgttatttgtcgatttatggatactgtgtgttgcaaaaaatcaaaatctttgtattttaatcccattatttccccttttctgagaccgcaaaacagtgctagcaacacctctaaatagatggaatggtattcctttgctgcagcaagaaagatcttaacttgttccttggttagaatcgtaattttaggggaattccaatatcgttttttaactcctggtagtggatcattttttaaatatccgtcatttaatgcatcagttaatgccaaatgaatgactttataagccatggcagcagagcattttgaatatccatcacattcatcaatcaggtcgtctaaaaacttcgtggtaaccatgcctaataaaacatctcgttttactttaggtaaaatgatctgatagatggtccatgaatagccaactttggcagaactatcactatatggcaaatataagtttttcatccaaaaatccagatattccgtaaaagtatattgaatattggttagtctttttattcgctctatatctttttgaaacttctcattgaagaaaaaataactttgttcagcctgctctttgtcggaaaaaccgctttttatttcatattttattgtataagtataaagattgatttcttttataatatgattccatgtattattttcataaaacacaacctcttttcctataatatcgttgttcatatataagcctcctcatgtgatgacttaaatacctcaatgaaaccttatcaaaatgataaaatttacgtcaacagaaacgtatgtccggctaaagatcattctgtctctccgttcaaccagttatcaaaaggtactttaggaactctatatagatttcctattttcaagactttaaaaggatgctgcattttataggtttctctaatcagttcatatgcggcacttctgctgattcccaaaatattttgtatttcttctacctcatagactttttttactgttttattttccacttgtcctcctttccaagtttctcgttttatatgttttttatcaaaaggagtcttatactataatttctcgtaagcccattttgtgttatagaaacaaaaagtctattaccggacatacaaaaacaactatttacccgaagttgtttctaataaataaaaagttctttatttccttttttctgtaaataaataataaaaaatggtccagcattttaccatagaagaccttctaaaacattatttacagaaaaagtttcacactctctattgatctgtaacggatcactttccgcaatttcaccattataataaaccctaaccgtatcaccaacattgatcttggaaatgttatctttattctcaatatctaaagaaacaactacacttttcgtccttttgatatccttccaacatctcacagtgaatcattatggaattttcgtaaactttttccacaactcccgtaacactcggcttgttttgaataatatcatccaaagatttactattacatcccattaagcctaaaacaacaaaggataccatgaacagtatcatccatatttttttcataagccccactcctattcagaaatatcaaatttataagggtttcagcagattgtcttccacctcttcataactggtcacttgtgtagaaatatctatcatctgctcgtcttccactataaagaaagcataccaccccgacttttctatttgaatacgcatttcttccagttgaattggaattctttcccaaatctgatcattataataaatatcgatttcttctggatcttctgaattttgttttattgtgtcttttgaaatgataactttacctacctccatctgtgaatctatttcatactctccagcctgccgtattaaaatcaattataacattcataaattcagacatctctttttttagttttttttaaaattaaaaatccaatacttattactacattcagagaaaaaaatatcaaaagataaattaagggactttcaaaaatatatctactactatctgtgtaatatccgtttccattactaaaaccaataacagaatctatatattgaacaataagagctaacagaggaagtacacacaacccaaatacactaaatattcctgttttaatagccaatatacgatatgaagaatctttcatttaatcaccttttcttcctgcaaaaagaattttcatccataaagcgataccaatcattacgaccagtatcgcttttccaaaatacatccttcaatgtcttctttcataaaggcaccgacttactgaataaatttcaatgaattaaaatcaattcccggtacttctgccgttctttcttcgtttttattagcgtttaaatagatataatcattagcgatccaccctgatgctccagttgaactatcagatacctgccaccaaatataattttcatttactgaataattattatttagtaaaacccaatcttttttattctgatccaatagtccaatcatttgtccggaagtgcttgaggtatctcttaggcaagcgccatttccttttatgtgtgcaagccgataatcttcttctgatttcattagtttttctatctctggatttttctcccatattttctcaatctcattctgatctgtcataatttccaattcagcaaacacttcattctggtctaagtatttttgaattctaggattttccgaaacaattttgttaatagcttctgtgtcttttatgacttctaaatttgcaagtggttcttcatctgttcctacgttctccctatccgctaccacctgctttttaagggaatcctctatttcttttgttacacgaacagacgctccggcttcattaaaaaatgcgacttctacttcttccttcttctgttctgctgctgaaacactaagcactgacactaaaataagcccgcctgctactaatacacttgataactttttaattgttttcatagtatccctccatttttatcattcttttaacatttcaacactacactgtccatttttcttctctaaaatcagtgtaactctttcaacttcttttccatcagaaccacatactttaatatgcaaggttgagtgatcaattcctggtatttgaatcacattaccatcctggtctctgaagtccatggtattcatcccgtccggcatccaaataatcctattttcatctctaaaaatattgccagcatttagatttccctcattttctattgtataatagcgacttcctccttccacacttatttctaaaacatagccttcccccaacagcgttttttctttttccagatacactttctcattcacttttagctgtaccatttctcctccagttgctgcataaactacgaactctggagagtgtaaaaaataagctgctgaaaccattatgattacagctatgacagccgctgcagaataacacttcctcataaaagatgcttttcttttttgcttttctactctcttttggtatgaatcatatattttttttgcatcctgttccgccaatacaatatcatctgctaatttggacatattttcaaatatacttttcatcttatctcccttcatatttttgttttaatctttttcttgcccgttctaactttttctttattgcactttccgttgtttttaatatctctgcaatctcacgacaggagtatccctctatgtaataaaggattaagacttctttatcctttgcatttaaagccatcaacgcatccatgatccctgtttcttcaggttcgtggtaatgtagtgcaagcgtttcatattctattgtcggatgcatccttctaaaacgaagcatattcttacaaatgttaatgttcacccttgtcagccatgctttttcatgattttcatctctaaaatccatctttgcacttatatatttcagaaatgactcttgcaccgcatcatacgcatcctgttcgctgcatagcataagaattgatattttgtatagcagcttactatattttttaaaaatctgatcagcatttttcttcatctgtttttctcctcatatatatcacacatgagatgggctatgggtgacatctaatttataaaaagttgaaagcaaaacaaacttctggttttattccaaccattttatttgtaaaagaagagttcataataattacttgaagtaaattataacaaaggtttttgcttacaattagttaatttttcaaattacatatcatactccgattttaagcactgtacttccattactctgcatcttaaaatcaatctcgtatctgaagaagaactgcaggtagacagtatgatttcctccggccagtcgcaagacacatcgtcttccaaagcatatatatcatccttcatggacactttttcacacgctgatatctccagatgtaaggttttttcaggtaaatacagatatgcagaacctgagttcttccggaacacaggatcctgatactgcttcagattactgaacatgctgccgtctttcatattatgaccgtataagatcacgcgccgatctgtaaaattatcatggtttctataatccagaaagatacttcccgccttattgttttctttttgaaaagtgtgatagaggtaatactcgttatcttctccctgtaccacaggataatccaccccaatccccggaatctgtatccaggcaactagatcctcattgattttacgaagtcctttaaaatcaatttccttccctgtttccttttccggttcatctcctgtcattttttccggctgacatacaggaacttcttttatgtacgccttcagttcttcatattctttttgtccatcatagtattctttccctatatctatcagttttacagttgcaactccaaagactgcaatacagagcagtaaaatcagcttttctcctatatgacgcatctcgtttcctccaataaaaaaagagattgccaccacaattttaaagtgacaatctccatcgttacatgttacattttttcagcattatcgtttatcttctccttctgcggatacggattactataaccacaatgccaagtatcgctgctgccataataatcaccggaatccatatctttgtatgatcaccggtttttggcgcatccggcggaggtgttccaggctttctggtattttcaatttcttttgtcacctcaatgatttttgtctcatcatcctgataatcgaataccacttccacctcctctgagtttgcttcatagccttctaacggtttcgtttccacaagaacatatacaatcggttctacatatttgccctcttcataaactgcaatcggcagttcttcactctttgcagttccatcctcgccggtcaccagtgttccaactacttccccagtagctttattacgaagttcaaattctacacctgcaagcggagccttattttccgcatctgtcttctgaaccaggagctggccggatggacgttcatctttcatctctactttctggatttcgcctgtttcttctaccacaaaaggaacatctgatacaacaagatatccttctggtgctgcctcctcatgcagaatatattcgcccggttctaacgcatacactttatgcggctctttttgggaaacccattcttctacaacttccccgtctttattaaggatctgaagtttcgccccttctacttccttttcatctgtaatatcagtttttgtaatttctactactgtcggctggttttcaatctcttttgcaagcgtgataacctccggttccggattttgataggttgcatcaaaggaccatgtatcttctgttttcagatatcccggggctgcttccagttcttttaccagatattttccatgtggaagatcaacgtcaaagcggatgcttccgtcttctgcggactctgtttttgcgatcagagtaccagattctataagtacatttcctgcaggatcaacaatatcttcctccgcatacaatccaaatactgctccctgtacaggctcttttgtttctttggacaatttcgtaagaacaagctctatcttctggcgcttattttcaagttccatagaaacataatctaccgctacttcctgtccctgatacttaatttcaaattcttttgcttcaggatccagaacaaaatgatgatttccaacatccgtttccttcagataataagaaccaatcggcagattgtgaagtgatacagttccctcttttccggtcacaagttctgcaacaagcccatctttttcatacaacactttacggttccctgcttcatctttctgtccatctggtgtataaatcgtttcttttgcatagatttcaaaggttatgccttctgctccctttttctcatattggaacgtatagccgctgtcttcttctatgacttcttcttttccgaaaaattcactgatagaatttatggtgccagcgatgccatttttcatttttgtaagaagggaatcttccacattcttagcacccacaagatcttcccctgttttcttgattgtcagactgcctactgcttcatcgttctgctggcgaactacgacaatatattttccggtttcttcctctacttcataagctgtttcggaattcacagtgatcgtgatgaaatcgcgttttgcatcttccttaataatcttaaggaaaaactggatcggtctatcgtcaaacacacgccatggctgcggttccctgctgtcttcggtaacggttacaaggaatggattgatggtctgcagattttctggagttgtagattcaaagaccacatatttcccatatggaagttctggagaacgtacaacccctttcttgtccgtgaacaattcttccaccgaaactttcttaccattctcgtaataatgtgccgtttcatcttctgaatagtcataaccgataaaatcctctgctttgaaagcatttccttccgatggtttcagacttccatcttttacccctttcagattccggatcagaaatactttaaatccagcacctttcaaaagctctgtttctgtctggtttccatcctctgaaatcttgatcagttcaaatgcctgtttttttaccgtttctttcactgtcacattccgatgcacgattgcaacatcctgtccttcgtagccaacttccaccggataggcagtttcatccaaaagatatccctcgccaggtgagatttcttttgcataataatttcccagatacagattcgtaaaatcaacttttccatctttgatcacgccctgtgcaaccagatcatctttttgatggacatcttctgactttccgttcggatgtttgatatcctctgctgcatagagcccgtaaactgcaccatccaagtctgcatctccctggctgatatattcttccgcatctttatcaatcttaaacacatggatttcccctcgaacctctttattggaaaacgtatgtgaaaattcatatgtataagttttatcattctcatattcaaacaggaagtcataccggtcagaactcatataataagattccggtgcctgaatctccttcaaataatagcggaaattgataggaatatctgaatgaaaagccgcagctccctctttatcagaagtgaccttctcaatcagggtatccttttttaccactacttttccttctgcattcataatgtcttcacctgcatacagaccgaatacagcaccctctaaagtcactttgtcattttccgatttctttactgcctggacctttacctttggtctgtcattgatataagtggtctcctcctgtaccaattccaccgtctgtccggcataagaaagggtcacatagtgtgtgcgttctgcctctgtctttccgatagtcaggtctgccgacgccttctgctccacgatcttatactttcctaaataaaaaagaggcattctccgcagatacattcagctttaagttctccgcattctccggtacttccggtgtttctgtcagtacaggttccgggtcagggtcactttcctctgtatcctcttttgcacttttctgattacggtctgctcttttgttctctggttcacgaggtctgactacaatttttcttgtcagttcataacacgctcctttttccggtgtaaccagataagttgcaaggtatgtaccagggcggtctgcaaaaaatccctgtccatcttcgctgacaacatccatgaatacagctttttcaccttttttcaaggcaagccccgtaaaatcttttttgatttcaaatgattcaccctgctcaatcgtcaaagtttcggcagtgatctgtttctcattctcatcgcctttttcctcctttattacatttgtctccgattctgctattctgccttttgatgccgcaaatacggcattcccggacggaataagtgcagaacaggataaaagaaaagccagcgttcccgccagccatctgtgttttctatatttcaattgcaacgctcctttcctctggctcataaatcaggccataaaaaaacggaactgcactcttacagttccgcttttttatcacctgattgttttgggacgtatcatgaatctgccagttttactttgcatcgtttcatataacacgcaatcccatattttaaaattttatccactccgttctcccagagttcttcatcatatttcttttcctctatctgttgtagtgcccgttcacaagcctgatcaagatttccgtcattggcgtacttaacttcgataaggataaccgtttcactgttttcggtttcaacgaggatatcgctgtatccttcgccgctttcctgattggacgatacgtaccattcttccttcacgcccagaattccaagcagtatcccatgataaaagttctccttgcttgcttttctcacaaacgtatcccggatactgatggtctttttcaggtagctttcaaaaatttctcctaccttcgtttcctcaccgtttttcagggcatcacagaaccggcttaacgtgtcgccgtcttttttcacacgctctttaaagtattccatgatctgtgtttcaaaaatatcccggatttccagattcggtatcgcaagtttataccgttttgcatcaacccttccacgctgtgttaaatatcccgtcataaataacaggctccagacgttctctaacgactgatacatttccggatagacaagctcctgatgaatctcttttatgatttcctctccggcaagcaaagtttcaatctcacgcttggttttaaaattaccggacatttgaataaatttcttgacggcatcattactgctggtgttgatccaataattttccggaaaagaatccgcatggtcttttaatttatcacagtaattcaatacatcccaggggcagtacacttccacgctgccaaactgatacccgtcataccagttctttacttcttcataatgatcctcgatttcataatacttcagcatttctcttacttccgtatctgtaaaaccgaaatattcatcataccgttcatctgtaatggacaatactttcaggttattaagccccgtaaagatactttcttttgaaatacgcatgcatcctgtcatcactgcaaatttcaggctgtcattcgttttcaatgcctgttccaataaactacggattaaaaagatcatctgatcataatacccgttttcaaatgcttttgctaatggaacatcatactcatcaatcaaaagaactacttttgttccgtaatgtttctccaataattccgataatattttcaatccgctgcaaaatacagctttactcattccgctatctaaaagtttcttatattctgacttatcaaaatcacttaaattcccgctttccaaaagaaactgcattttacctgctacattcttcataatctgaaccgcaaaatcaaatgcatcctcataagtggctgcattgattcctttcagggaaattgaaataaccggatatttccccatatactcttcacacagttttgtatcttttgaaatttccaatccatcatagatactctggtctctctctatggaaaaaaagtgttccagcatactcatatttaaggttttcccgaaacgtcttggtctggtaaaaagatttaccattccaccgttacggatcagttctgaaatcagccccgtcttatccacataataatagttatcgttaataatcagctcaaaattttccaatcctaccggaaggcgtttcttttcttcacccatgttattcacactccttctctgttggttctattataacaaagatccacacaaaagcctatacctaactttgctcataattcccgtaattcccagtcatcaatgcccttgtaattttcctgccagtaacattcgtcatccgtatcccaaaccgcacgcttacagattaaatccagcttttcacaaatctcatagagtttcaggcagcctttccgaatatgatttcgtttttccctctttttcggacattctccattactgcctttacatttttcacaaatttctttgtaagcatggtcacagtctaaccgcatacatttatccatatcatttgcttcaatgaccacttttactccctgttcttttaatcggttcagtgacaattccagttccttgtaattggatacgcctggatttgctgtcaatttgtcatccacatcatacagactacgattcttttttgaaaacaaccctgcaaaattcaggttatttccaggtataaggttttttcctgtccttttttgaagatacagatagaaaaagtttccctgttctacttttactacagtatagtccagattctcccacgtgctttttgtgtctgtttcctccagccatgcaaaaaaacttccggtacaagaacccgatactacccaggcaggcagcactactgatttttcctttctcgtgctcattacgaaagttcccctggcatatcacagtcatgccagcgtacattcatgcactgcgcaattttctcttccatctttacgagactagatggactgctcccattttttctggcaaaaaagagggcctcacaaagcccacaataaatctcgtatgcactgcatggctgttctccaaaattcaccttaaaccgttccacagtctcagcaatcagtttctttccaaaactctgtttcttcatgacttctgacagggtatttaccgggtaccggatacggatatcacacagttttccgatatctttgagtttctgtttgtaatactggaaaatagcttccatattttcagtaaattcctccaatccctgtttgtgacgacgctttgtacgcaaggcttctcccaaaacaatggtataatctccatctaaaatagaataaaagatatttgctcccgacgctcctacatcagaactcacaatacggataaatgtctggagatttccaaacggctttttcccatgttcttccatcaaatctgcataggcttttgtcatcttctcgtcgatgatcttccatgtaatctgcataagcataagagaattccgcattgtgatcgccactaatgtacgctgatgcaatcataaaaagtttcggcatcgagataattgcataatctgcctcatcaccggagagtactccccttacctttccttctgaaatgcgaagcatgcgcgcaaacctaaaaaacggaactgcactcttacagttccgcttttttatcacctgattgttttgggatgtatcatgaatctgacaattttactttacagcgtttcatatattgttactatccccattaaggagttttttattcgctttctctacattcatttttgccatgataaatgtgatgataagtgtgatcactaccggaatccataaatacatgatctgcagcatctggatacaggaatcagactgtacggccagtgtgccgtcaaagccactaaaatctaacagccagcccgtaattgcaatcccaatgcccccgccaagcttgatgccaagagaagtacaggaatacatggttccgtctactctcttatgctttgtcaggtaagtatattctgaacaagaagcaatgactgcattcatatccccctgccatggtcccataccaaaagcagcaatcccggtaaataaaagcatcagtggtatacttcccagatagcctgctacgatgaccagtgctctgccaatcgttccaattacatatcctataagattcagtttatacattcctttccatttttccaccagcatcggtgtaatgagcaatgcaataatcagaggaatattgatggcccaggaaaatacaccatagagcttctcattaaacaggatatacgtcatatagtaaatacccatattcagcatcgctgtataaatctgctgtaaaatataggtggcacagatcataacataatacttatttgtaaataacagttttccggcatcaatcagagaatacttttcttcggttccggcttctttcccatcatttaactcttcttccggtaattcctttacagaaagtacagaaatcgtattgataatcaatccgattactgcatagataatcgcaacggtcctccatccggctgctccgccgcccatccattctacgaatccaatggttaaagactgaatcaataggctggtagaaaaagcaaaaatgaagcggtaagaccccatctgtacacgttccttactattctttgttaccagggctgtcagtgcagaatacgcaatattattcgcggtataaaatactgcatttaacagcgtatacgcaataaaaaaccaggcatactgtgcaaattcccccatagttgcaggtatagcaaaaatagcgactaaggttacggcacagccgatatagccgtaaagcatccaaggccttgcttttcccattttactctttgtcttatcaatcagagttccaaagaaaacatccgtaattccatcaaacaacttggatacggcaatcagagttccgataattccgggatttaatcctactgtattggtaagataaatcatgacaaaagaggatagaaatgcgtaaactacatttccggcaatatccccggaaccataccccaccttgttataccattttaaatattttttctcatccatgtatttttactcttccttcctgaataaaagtttcatctcaaaaataaaagtttcttcatccaactggtattcagctcttagttcagggccacaactgttggaaccaattccattctgggcgtaatccaggcagacaatggtgttcccggatttttccaattcataatgatgtgccttccgggtcagttcttcctgtgtataataggacacattgaaggaaaacggtttgggtgacacggctataaccgtctggttttccttttctatcatcacataatcacaatcggtatgacttccattctcctgcggtcggatataatcttcatgctgctcttccactgtggcatcatacagcccatgactgcaggacttgcatttatcccgataactttcgtatggccccaatccataatatttcaggttttcatattcctccttcagaaacagacggataccaaatctgggaagctgcggaaattccatgttctttttcacctgcatctttactgagattgatcccctgttagaaatttcccagacagcttttatatccagaactttctgaagtgctactgctgctacagacatggtgctgtaaattctgacacatttcccctctcgtttccattgaacgtcataggctctggctttactccggtcatatccggcatccatccattcctgcttgatctttcggtcattatccgtaggtgctctccagatattcagttccataggagtctccagaagttcctccccatctatgctgaattgttcaaataaacccgaaagtttattgtaaacatagaagaaggtatctgaccggatggaaagaaaacgatctgtttcagaaacttgtacctctgcttctttctgttcctgattttccaataaggcgattgtctgttggtttcttccatcccgattttccaaaaggatttcgtcaaatcccatcatactcccttgtgccataagactggttctatgtttcaaatggtaagatacttttaaataacattttccgcaatctggaacagtaatatccaacaaaatggttcctctctgatgaggcaatacagaatcctgcaaagtcaactgtttcttctccaatagctttccgtcacagttcacttcgtataccagatcgatataatcctttaaatccacatagttcatatagttttccagacacagctctcctgttttctggcagaaagatacggctcttgccggtcggtatacattctggtattccaaaagcccggtatgaggtgttctgtccggatataccagcccgtccatgcagaaattcccatcgtggacttcttccccaaaatccccgccataaaagtatttttcttttccattggcagcctgtccctgataaatggcatggtcgcaccattcccacacaaagccgccgcaaaggacatcatattcataaatcagttggaaataatcttccaaatctcccggtccatttcccatggcatggcagtattcgatcagaaggaagggcttgtccggctttttgtccacatattcctgaatttcttccagagaaggatacatccggctgaaaatatcaatgttactgtaatcatattttcttctgtcgctgcgataaaaagagctttcataacaggtaagccttgtaggatcaaacccttttgtccattttaaagcttcctcaaaagtacagccataaccacattcatttcccatggaccagatcacaatacaagggcggttcttctccctgtgcacacaaagttttgtacgatccagagtcgccgggataaattccgggttatccgagatccgttcattccatcttcggcttacattctcccagctggaatcttttaaatactgggactgggttccatgactttcattatccgcctctgcaatcacaaaaaatccatattcatcacaaagctgataaaaataaggcacattgggataatggctgcttcggacggcattgaagttactctccttcatcatctgcagatcctttttcatctgttccatcccgatcacaaagccagtcaccggatcggaatcgtggcggttcacgcccttgaatttgatggcagttccattcacatagagaacagcatcttttacatggatttcccggattccaatccggtctgtgatcacttccccttctgtttctaaaaccagggtatataaatacggctgttccgggttccatagatttggttcttttacaacaaatactgctttatgtgtataaacagtacctgtattttcctgaaatacctgagaagcaacctccctatgttctgcatcatacaaagtaagttttgttggcactgcctttcccctgtaactggcctgtactgtaatgactgcctgttcctcctggatttcggtagttgtaaagtagtcatagaccacgttttccggacggttcagaagatatacatcccggaagatcccactcatgcggaatttatcctgatcttccagataggtcccatcacaccatttcagaaccagtaccgctaaggtgttttctccatctgccaaaacgtctgtcacatcaaattcgcttgtggcatgggaaacctggctatagcccacatacgttccatttacccagacataaaagcaggaatccacaccttcaaaattcagatacgcttttggggctttttccggtctatgatagataaacttcttgatataggctccgcatggattttcctgtggcacatatggtggatcaagaggaatcggatatctcacgttggtatactgatggctgtcatacccataattctgccacacccccggcacttctacctgtgaaaatctgctgcagtcatatccttgttcgtaaaatttttcctgcagatcgtagatactgttaaaatattgaaactcccacatcccgttcagacagatcagtcgatccgatgaaaaacggtcttctaccagaggtcccatgtcatgggaagccggtatatagtaagctctgcagggcatggtgttttcatgcattatttttaagttctcgtaatgtcttggcacgatcacaatattttcctcctttgttttcatgattttctctttgctttaccactattttatgctatttttacatgattcgtccataaactctattggacaaaatatgcacaaaatgatacaatatcgttcataggaatctacttgtcaagaggaggcgcaagatgcatcatgtatatcaattctggctatctgcataattcattattggattttaaagataagagcaaaccattagtagtgggaagttgtgggacataccggctgatccaccagcccaagctgcccacgtaccgcccaaggggaagaattgactatcaattactttatattgcagcagggaagggtcatttctttttaaatggcaaggaagaaatgatagatgccggacatatgattttgtataagccacgggagatgcaaagatatgtttattacgggacagaccagacagaagtttactgggttcattttaccggtaataatgtaaagaatattttaaaagaatatcatttgtttgaatccggacagatcattcagactggaaactctacggaatatcatcagattttccgaaaaatgattcaggagctccagcttacccgtccccattacgaagaatacttatctcttctgctcagagaactgttccttctgatcagccgccaggctcctgtcggaacatcctctcaaaaccggatcttacaaaaagagatggaaaaagcagcacaatatttcaatgagcattttgccgaagatctttccattgaggaatatgctgtgtcgaaacatttaagcacctgctggtttatccgcagcttcaaacgctacaatggactgactcccatgcagtatattttaaatctgcgaatcacgaatgccaaaactctgctcagaactacgacttactctgttgctgaggtagcagcgattgtcgggtatgataatcctctatactttagcaggttgtttaagaagcagacagggcttccaccatctgaatttcggaataatgaaacaatatccatgtaaaataaaaaggggaaacaatcgctgcaaagtttatcccggagcaagaaaaagcacgaaagtaaaatccatttagattcttactctcgtgctctttttgctcttatttggaactatttactttttacataggtattcagatcgtgtacgcaatattcattatatggatatttatccgttgttacatatcctgcaggtgcatcgatcaactgtggaattcgatttacgatcgttgcacaggtcatttctactgtcgcaggttgatttacggaaattgttgtttcaggttctccgataaatgtccagtcgtttctgtcaaattcatcgggtgcaaatacttttccaacgcattccgttacaaaagtaatgccttcttctgtctcggttgtgacaactgccctcatacctgtcggctcaccagctttgatcaccttatttaatgtggtagaaaacagatcctctgaatgtgtggttggataacacttttgtgtctgggataaaatgtgaagattcatcttgctgcaaagccagccattttgattccacatatacgccggtacatactgaccactttcaatcaattccttcagttctgcttccggcatatcattgatatttgcaatttctttttcaaattgttcggatgagaatcccgcgccatgtccttctgccaatgcaattccataatcctccacattataccagctgctgccaagaatctttgtaatcttgaaagaagatcctgcaagatttgtcaccatggttccccatacaagatcacaatatccgactcctgtcagtgtgcagtttccttctttggcaagtgtatccagtttctgtgtcaatgcaggggaagaattccacggatataacgcttcttcacaagttgtgattgcattgattccatgttttgcacaaattgtaaaaatatcttccagttcagctacggtacttctcgttgcaataatacacacatccggtttcaaagttccaagaagctcatctgcctgctctgcgggagaaacaacaactccggttgccggataaccatccccgacgatctctgctgcgtcttttccgcaaacagcaggattcacgtcaaaagctgctactaaagatgctcccttttcgattccatatcgaatcagatattttcccatctttccgcatccatattgtgcaaatgtaatttttctttccataaagaaacctcctgtttttttgtttttcctctcggtattgatgttataaaaattataaaccttatacttggtataaagtcaatccatattattgtcaaaaaaatgattctatattatgataaagaaaaaacatatccaggaggtgtactttttgaaaaattctttctttcaaatcggagaaatggcaaaaatgaaccatgtaagtacacagacgttaagactttatgccaaaaacaaacttctagtaccagaatatctggataaagattccggatatcgctattatacgttagaacaatgtgcaaaactggatttgattcgtgctttgaaaagctgtcgtctatctcttgagcagataaaatacattatcgaacttccttcggcaaaattactgctggaagcgctcgaagaacaaacaggagttttaacgaaagaattgtaccagttatccgtcggaagaaataatttgctgcgcattcagaaaaatttgcaagtactgcattctcttcctcctttcggagaggtcttttttgaatatgttcctgaacggaaaatagatcttcagttgacagattttgacttttttgcacttggatatgaaggatatgaaaatatgatgctgcaaatgcaaaactatctgcatgaaaacgagcttccgccttcttattttataaatgtaggaactctgatgaaagagaaagattttatgaacggaacctatatttcacatgcggcatttatttttgtagatgaactttatcccaaaacggaaaatctgtatacacttgcttctaacacgtatctgtccattgcttcagatgatccggatcgagaagctgagtatgcacacaaactgtatacagagatgaaacgacaagatatggaaccatgcggagattatctttgtgaagtactcagtcagtttccactgagcacttccggcaagctgatctataagatccagattccggtgcgccggacatgaataaattctatcccgatcataagaatgaaaggtgggtatttatgagtacacttccacaaatttcggaagctgaatttgaagttatgaaagtcaaggcaatttctatcggataaaaatggtttaaaaggcctctaaagtcgaaaaaaggaacgcaaacgttccttttatgactttaaaagattaaatttttagtcggttgatttttttccgtacaaaacaataacagattacttgtaatacaatcgtaataaaccatgatgcaggataggaaataaaaagtacatctaaggaacgatgctttggaaatatccagaatatccagataatcctggttccgacagtcccgatcacagacaaaagcatcggtactgctgagaatcccataccacggagagctcccgggaacagatccatcagcccgcacataaaataagtcactgttgtatacaaaagaatctccataccacattgtacgactgctgcatccgatgtgtaaattcgtaaaagatgcggtcctatcagataggcgccacctcccagaacgacagaaacggtgactgacaaaaggatgcagtttcgaagaattttatccattcgtttccactttccaacactgtaattctgactggtaaaactcatacaggcctgtgtgatggaattcacagatgcaaacaaaaatccaaaaatattgttggcagcagtatatccagccattgctatagaaccgaatgaatttacagaggattgtaaaaggacgttggaaaaattaattacggtactttggattccagccggaattcctacctgaaaaatctgttttaaatagatccatttcaatcccatctttgagaatcgaaattgatagctgctgtctgactggtagagacaccgaagtactaacatacaggaaatcatctgtgcaatcaccgttgcaattgccactcctgcaactccaagatgaagtacgatgactaaaaacatattcagcaacgcatttgtcacacctgcaatgattaagaaaagaagcggacgttttgtatctcctactgcacggagaatggcagctccataattataaagcataaaaaacggcattccggcaaaataaattcgcatataaagagcggattgatcaatgacatcggcaggcgtatccataagtttcaatgcggtctttgaaaaaaataaaccgataaataccattataatcccgctgatcaaagcaaatgtaattgctgtatgtacagtttcagacatcttcttttcctgacctgacgcatagaagcgtgctgccagtacatttgccccaagtgaaacgccgataaacaaattggtaaatacgttgatcaaggcagtcgttgatccaactgctgccaatgcctgactgcctgtaaatctaccaacgacaacaatgtctaccgcattaaatagaagctgtaaaattcctgataacatcaaaggaatggaaaatgaaatcaatttatccaaaacggtaccgttacacatatctatttcatatttgtttctttttactgctgaatccacagtatcccccctaatctgaattttataaatgatcttgtatattataccgcaaaattctcataaagataagaggaaattttttcagaatcttttcctgctttcttaaaccggaacgtcggaaagccttgataacatccaaactataatttattatacttttaggatgactgctccattttctaatgatataataatgcataaaaataatgtttttctacccattgttcttgaaaaaggacattttcaatcttcccgatgtgtttacgattcgcacagagattgagtgagcaaattgcagttttgcgaaaagaatgaaagcgaaaaaagttgtggagataaagtatgaaagaatatgtttatgttactttaagacaaaaacctgaattaaaagaagaagcagctacatggttccatgataaatgggaagtgccacaagaagcgtatcttgaatgtatggaagcctatctcaatcatgcaacagaatatggttggtatctttgtttggatggcgggcgcattgtaggtggtcttggcgtgattgaaaatgattttcatgacaggaaagaccttacgccaaatgtatgtgcggtatatacagaacaggaatatcgctgtcaaggaattgcaggacaattacttgatattgttgtgaaagatatgaaatcaaagggaattacacctatctatttgattacagaccatacaagcttttacgaaagatatggctgggaatttttgtgtatggttcaaggggatgaggaacctgatatgacaagaatgtacatccataggtaaattcatatttataaataaagggaggaagttatgaaaaaaatcagtttgtttatagcgatgagccttgacggatatattgcagacagcaaaggcagtgttaactggctggttgggcatgacaatgacgatgatagcgttgacacatattctgaatttgtgaaggagattgatacggtgatcatggggtggaatacctatcatcagattgttacagaactttcaccaaatgaatggatttatcatgattttacaacctatgttgtaacgcataacccaaagacatcttctgataaaatccgttttatcaatgaggatcccgttgaactggtaaaaaaattacgagaaaaaactggaaaagggatctggatatgtggcggtgcaaatcttatccaacaattggtcagggaagatatcattgactgttattatattaccgttattcctacgattttgggtgcaggtattcgactttttgaaaagaccgatcatgagattcaattgaggctattaaaaacacaatcgtatcagggtatgacggacttaatttatatcaaaagataaaaggctttgcatcttcacaaagcctttatcttttgtcatccaaatctcttgtatcttttctgtttattccgtttcctgcattgtttcagatacggattgagcagctccttgagcaatctcttcgccgacctgttccagccctgtaaaattgatatttttggttgtttttccttcaaaagtttctgcacggatgatttcgttcatatcgatcccagttgcttcttttacggattccatgacttttcccatgataatcggtacatttcctgcaagatcagataccccttcactgttgcctccaattacggtgactttatcaattgcagataatggttcagccacacttttggcaatatccggaagaacacctacgatcatttctaaaatcgctgcctgcccgtattttttcatagcttctgcctttttgtccagagcttctgcttcagccagacctttttgccggatggcttctgcctcagccagaccttttgcacggatggcagcagcctctttttctgcttcatactgctgcgcttctgcatccttctgacggcggtataattctgcgtccgcattctgcatctctgcatacttgtctgcttccgcttttttacgaatctcagcgtccagctttttctcagctacttcagcttcttttgtctgaagttcaatttctttctcgcggcgagcgatatctgcttcctgctctctaatttctactgtttttcgagaagtctgtttttgaatctcatatgcggcatctgcttcggctctttttgtatcttccccaatcttcaattctgctttgcggatttccaaatcattgtttcgctgtgcaatggcaagttcggcagctactttcgcttcactggctttgttggctgcttctgccgatgcaacttctacatcccggtctgcattcgcctttgcaacccgtgcggtcttacggattgtttcgcgattatcgattccaagatcatcaatcagtccgtctttatcattgacgttctgaacattgaaagaaagaattcgaattccaagttctttcatatcttgttctgcattttgtttgacttcctggctgaattttgccttatcctgacaaatgctttttaagtccatggttccgatgatctcacgaagatttccctgtaaagattcagtgatcatagagcgcacatcgtctgccttccgattcagaaagtttcgcatggcaacagcagagacctgattgtcagaaacttccatcgccacctgggcaatggcatcaactttgatattgataaagtctttggttggaatataatcttcggttacaacattgatgttgatctgtccgacttccagccagtcaacacgttcaaaaaatggtactttaaagccagattttccaagcaggactcttggattttttgaaagtccggtaatgatcgccgctttgtttggcggggctttcacataacctgcaaacaagaaaataagtaacagtactgcaattggtataatgatatataacactttgacccctttcctttggatgactctgtaatacaggagaaaactatatttttttcattataaaatagtaaaaatatactgtcaatcaaaataaatggtttagagtctcatcgttaaatagagtgtaccctttgctttattttttatggtttatatcatagaccgtttctataaatctcatttatggccgcctgtgttcgttccatttcttttttctttctaaattcttcccgatcacttaagattgcaatcatttcatctatcacatcttccattctaggttccgtatagcgatacaagtaccccaacatcctggtcgctgtataatcggtattcaaaatgttataagctatttctgaacaaagttctttcggatatcctttgataagtagaagtttgtacaattcatctgttctttctgatcccataaatcatctctcctgtaaattttatgttacctatatcaatattccttccaaatgatccaattcatgctgacagatctgtgcggtccaaccatcaagtttcaaattctgtttcttccaattcatatccaaatattcaacttctatcgtttggtatcttgttgttttacgaatgcctggaagagataaacatccctcttctgtttcataaggtgaatcttttctcactaatacaggattaaacattaccacatccacaaatcccagatttacaatgataacacgtttttttacaccgatcatattcgccgccatcccaacgcatctttctcgattggcagctaacgtatccattaaatctcttcccacttgaagatcggcttttgttgccggctcagatttttgtcctaagaaaaatatatctttcataattggttttaccattttctttatacctctattcttaaaatcactttttggattgatcctgaattgtagtataacagtttttttactttttttctatctcaccctttttttcttccctgagtctttcgttatatgggaggaaaattttgcctgttcagaagaagatgtaacaatatgcttattttaggattgcttggcgtgaaagagactgaactcgttgcagaaaaagcatatgaaatggctataaatggggaaccattggaaatctgtcaccgggaaaggccatttggcatgctcctgctgaacggaagcaaaaacgcagaggtgctttgtaatataaacgcccgctgggaacttttttgataaactttgagcgtaacacggacagagattggaacttatacgggctttctaaaaatttttactctatacgaacattgactggtcttaacgtaagttctccagcaccttcaaccctataccattttcctcgttttagtttaattgtatctcctgctccagaagtaatgtaacctattacataagtttctccactttcaatatctgtaaatacgacatcggtatcagtattaccagtaacttttacacgtcccctaataggctgtatctgttcatttttcattatctcatcacccgaaagggtaaaagtgtgcatcttaacatagccgttataacctataccgattacaaggatagcaagcggaattgcaactcctaatgctcgtttcaaacgtttcttaatcacactattattcctcctaaaattcaaattgaacaaaatcgctgcgcgatggcctgccaaggctgttgcacaatttcttattagttttctaaaaaagcagtgacaggattgtcccaagatagtattgtttaagtaccaccaaaaacaaacttcaaatacgggcttagtcccatgccactgcctatgaaaagaataccatttttacgctgtttccacaagcagttttatcaagcaaatgctcctccgtaaaggcatgtggaacttataaaatttcatttattttacggaggatattgtatgtacgaagatatttataatcaaatcagactcgctgcggaaaagaaaaatttaaagccatccacagctaatgcctactgtcatacgattagacattttttagattatacagggaaaccatgggatgaattaattattgatgacgcggatgcttttttaactgcaaaaaggttatctggagtcatgccagaaacttataatcattattattctgctatacgttttatgtataaaagaatcttaaaactatactgggacgaagatgaaatcacccgcatgaaacgcgaccgggctcttcctgttgttctttcaaaggatgaaatcaattctattcttgatgcaactaaaaatctgaaacataaagcaatgattgcaaccatgtattccggtggacttcgtgtatcagaagtggtacatctgcactatgacgatatatccagaagtaataagtctattcatatacgcaataccaaaaaccgaagagaccgatatactattcttgccgaccgtacactggatttacttacagaatactggtttcaatgcggtaaaccaagggatatactgtttccgagtcaatggactcacaattaccttgatatttcaagtgtaaatcagttcttaaaaataagtgcaaaaaaggctggcattacgaaacatttttcttctcatactttcaggcatagttttgcaagccatcttttggaagcgggttgtgacattaaatatattcaagcattattaggacatacagacccaaaatccacagaaatatatcttcatgtgagtaacaaaacactattgggaattaaaagtccttttgacgtgcaggaggattaggcatggaaaatccaactgtacaggatatatttcactctttttatctcaaatatctggacagatatacaccttctgcggaacaggcaaaagtttcacactccattatgaactgcaagaccggcgcttatggagcaaatgtcagtgtttgtgaagattgtggccatcttcagattcactacaattcctgccgtaacagatgctgtcctatgtgtcaagctcttcctaccgaaaagtggatggattcccaacgggaagacgttttggaagcaccttacttccatgtggtatttacagtccctcaggaactgaatcctttaatctattgtaaccagaagctcctgtataatgccttgtatcattctgtctcttccacgataaatgaacttgctgaggatgaaaaatatctgggtgcaaaggtcggatacatctgtatcctgcatacatggggatctgaaatgaatttccatccccatatccatgtcattcttctcggtggtggattgactgctaagaatcagtggcgcgataaaggtgaagagttctttttccctgttaaagtgttatctaaacttttccgtggaaaatatctggatgaactgaaaactttatggaaaaataaaaaacttcaatttcacggaagcagtgaaaaataccggaatcactatgccttcaaagagctgataaatatctgctatgaaaaagactggattccacactgtaagaaagcctttaacggtgcacagtctgttattcattaccttggtaagtacatacacagaattgctatcagtaatcgccgtattatccgcatggatgaagatactgtcacatactatgtgaaggactaccgtgaagcaggtaaatggaaagaattgactatccccggagttgaatttatccgtagattccttatgcacgtaccaccgaaacgatttgtccggatcagacattatggtctgctgtgcacccgaagcaaaaccaaacaacttacactatgtagaaatcttcttggctgcaggcaatatctgtctcgactgaaaaatatgaaaacagctcaaatattggaaacactttatggaatcaaggtttctgtttgtaaatgctgtggaggacatctcggaacccctcagcaacggatacctttacggatttaaaaaccaataattaaatatttttacgaagccgcagaaatgaggcctgtttgttgtggaaaaaaatctttttctataaagaaatctgatacaatattttaatcaaaacagtttttttctacaaaagaaacgaattgaaactccatatattccggctatccggacacgactttgttcactatagaaaaatcgaaattggtgcaaacgacagggcagtttatcagcaatctataagctgctttatcgtttacaccaacttcgattggtttctaatcaatttatctattcaaccctctgtaaaccctgttttttcaaggcatatcatttatactaatcttatttaccattaaaaattgcgggtatcctttggtggatactcgccgttctttagtttaatgatgccttgtattcctctccccaattccacatggcgtccagaatgggtttcagactttctcctaagtctgttaaagtgtattctactctcggcggtacctctgcatatacggtacgggttaataagccgttttcttccattgcacgaagttgtgcagtcaataccttttgtgatacattaccaattgattttttcagttcaccaaatcgctttgttcccgtgagcaagtcacgcaaaattaaaactttccatttatcaccaattaaagttaaagttgtttctacagggcaagcgggcaattcctttatggtttttgattcactcattatgattacctccacacaatggtttcttattgaaactttgtttttattatattgtatgagtctgatttggtcaatgtttccgtatgaaatcaagtgaaaaataaaatttcgaaatttttttgctttgtgccaacaaccggaaaagcctgaaattgcacatttgtttccttgcggtaactacccaatagtatcctttaggtaactacaccacaataaagtgcttactttacagtcgaaaccaacactcatacaatataagcaagagctgcggagaacggccgctgcgaagctctgagcatatcttaaaggagaaatccattatgagtatttttaaaaaattttttggcaacagccaaactaagattaaggaggaaactaaaatgaaaattacagttgtatgtgcagcaggaaagcagggaaaaaagcttgtagaagaagcgcttaatagaggacacattgtaaaggcggttgttcgtaataataattcagtacctgcgggtgtagaagttcttgaaaaagatttgttcgatctgacattaaatgacctaaaagacagtgatgttgtaattgatgctttcggtgcatggacagaagaaactttacctcagcacagtacttctttgaaacacttatgtgatattctttcaggtacaaatattcgtctgttgatagttggtggggcaggtagtctttatgtaaaccctgaacatactctttgcgtatccgacggacctgattttccagatatctttaaaccgcttgctgctgcgatggcaaaggctttaggggaactgcgtcagcgcaatgatgttaaatggacatatttaagtcctgctggagatttccaggcagatggtgttcgtaccggcaaatatattcttggcggtgaagaacttactcttaactcaaaaggagaaagtgttatcagctatgcagattatgcaattgctatgattgatgaagcggaaaacggtaagcatatacagcagcgttttagtgttgtcagcgaataaaacaaaagtgattatgataacggggctgtcaatagggcagccccactctgtctcacaggaggttttcaaaagtgaaaacaaaggaaatattaaactatttagaaaagaaaattcattcagttattattgcaacggttgacgacaagggactgcccgttacctgtgctatcgacataatggatggcgatgaaaatggattatactttctaacggcaaaaggaaaagggttttataatcgcttaaagaaaagtggatatgccgcattaacgggaatgaacggcagagatacattgtcctgtgtggctatttctgtccgtggcaaggtgcgggaaatcggaaatgcacctttacaaaagctttttgaaaaaaatccatatatgaatgaaatctatccgacagaaaaatcccgtcaggctcttactgtttttcaactctatgaaggtagcggtgaatggtttgacctttcccaaaagccgattgaacgagtttcttttacgattggcaacgaacaaacaaaaatgcagggctatgagatcacgcataaatgcaatggctgtaaagcctgtcaatcggtatgtccgcagaattgtattgattttacgagaatccctgctgtaatgaggcaagaaaactgcctgcattgcggtaactgtttaagcgtttgtccacaaaaagcagttatacggagaggataaaaacatgacacaaaccgaaagaagaaagtatttaatagcggcacttctaaaagaacatccgcagtacacagaattagaaatcccgtcgaatgagcaggaacaaaaagccttgctccgttcgctttttaatattcgtatgccgtttcctgtaacagatgaattcttgacgatacaagacgcttatttgcaggaagaaacacgaaaaaaaggagttacagctctatcagatttagagcctgttcaaaaaggaatatatctttggcgtggggatattaccacgctgcaatgtgatggtatcgtaaatgccgctaatagtcaaatgctcggctgcttctgcccaaatcatggctgtatagataacgctattcacacctttgcaggagtgcagcttcgtttggcttgtgctaaacttatgaaacagcagggacacgaagaagaaacaggcagggcaaaaattacacccgcttataatctgccctgtcgttatgtgttgcacacagtcggtccgattatttatggtacacttaccaaaaaagataaggaattgcttgcctcctgctatcgttcttgtttggaattggcagagcaaaaaggattaaaaagtattgcattttgctgtatttctacaggagagtttcattttccgaacgataaggcggcacagatagtgattgaaacagtaaaacaatacaaagaacaaatgaacagtgaaattgaggtgattttcaatgtttttaaggaacttgattacaacatctaccgagagttgctccgagcagattaacaggctgaaaaatgaaataaaaaatgcagacgctattgtgatcggcgcaggtgcggggatgtccacttcggcaggatttacctatgacgaagaacgttttgaaaagtatttttcggattttcataagaaatacggaattttggatatgtattcaggtggtttctatccttatgaaacacttgaagaatattgggcgtggtggtcaagacatatttatatcaatcgttatgatataacggcaggaaaaccttatatggatttattaaatatcgtaaaggataaggactactttgtactgactacaaatgttgaccatcagtttcagcttgccggctttgataaaaagcgattgttttacacgcagggtgactatggtctgtggcagtgttccaaagcctgtcacgacaaaacctacgataacgaagaaactgtgcgtttgatggttaaaacacaaaagaatatgaaaattccgtcagacttgataccgaagtgtcctgtttgtggcgcacctatgacaatgaacttgagatgtgataattcctttgtacaggacaaagggtggtattcagcagcaagccgctatgaggactttatcaggcgacacaaagaaagtcacattctgttcttggaacttggcgttggcagcaacactcctgttattataaaatatccattttggaaaatgacagcgcaaaatccaaaatccatttatgtgtgtattaactatggcgaagcaatcactcctgatgccattaaagaacagtcaatttgtattaacaaagatatttcggctgtattaaacgatttggggtaaaaagatatgggtgtggagattcaagcagaatggattatctgccctgtatgtggtagaaaaacgcacaataagattagagaagataccgagatgaaaaactttcctctctactgtccgaagtgcaaaaaagaaacaatcatcaatgttcaggatatgaaaatcacgcttgcagtcagtaaatgattatgtatgccgccgctattggtaacaccataacggcggttttcaatgcctatcggctatctctgtcaatggatttcttacgctgtctttgcggcggctgccggtttcctacggacttggtattcccactcagcaaggtcacggttgtactgttccacaacgctttccatttctcggaaagtacgcataaaaacttgcacatcgggataaccgtccactttatcacttcttgaatatttacccgaccaaacaattcctatgaactaaaaaaaatgattgtgttcagtactttgatccgattcgatatagttcttcctgtgcagagcttctgcaaacaagggattccatttttcatccggttgtttaggagcgtatttcttttccccttctttgagaagatgaaaataatccgtcagcaccttgtagcaatgattttcttctttttgatatttctgctccggtgtcggctcacgaatacgagagtggacactgggcttttggtggctgtcatagttaagagcaaaatcttcagcaaatatcttttatcatatttttattttccttagacatttcggaaattgacaatcctcctattcacatttataatatttatattacaatcgtaagattttaaaggagaaccattatgaatacacttccacaaatttctgaagctgagtttgaggtcatgaaaatcgtatggaaatacgcacctatcagtacaaatgacattacggagaaacttctgcagaccacgaactggagtcccaaaacaatccaaactctgatcaaacgtcttgtaacaaaaggtgccctcacatacgaaaagcagagtcgtatgttcgtttatactccggtagtaaaagaaagtgaatatattggacaagaaagttcttcctttctaaaccgctattatgacggagatattactgctatggtatctgcctatatagaaaatgacaaattatcggaatcagaactggatacgcttcgtactcttctttcgcagaaatagaaaaagggggaaataatatggcagattttatgatccgctttctgatttgtaatatactgctctgcggcatcattggcattttttcgcttatgaaacatattttgaaaaacagtttatccagtcggatgcagtacaacttatggtttctgctacttggacttttggcggttccctttttaccattccgctttttcaaattatcagaaatgtttgtatggtttaaaaacctgaaccttgttcctactgccaaaacagaaactacagcaggtcaaacattccatactaatattgtcgacacccaaaactggatggaaaattttaccctttctgtaaacagagaaacgcagtctatcattggctatctattacttgcgctttggatatcaggcatcattaccatgctgatattggtaatccgttctgccctatgtctgcacattttaaagaaatctgcgttgccacttcaaagccaaaaggttcaacaactatatcagcgttgcttaaatgatacaggtattacaaaaaatgttcctatatacagcactgctcatctcaaatcgcctgttattgttggatttttgaaaccgtgcatctatcttcccattcatcttatagcagatgataatgagacagatatccgatatatgctgttacatgaactgcaacactataaacataaagacggaattgcaaattatttgatgaaccttgccggaattatttactggttcaatcctcttgtctggtatgcgctgaaagaaatgcgtagtgatcgggaaattgcctgtgatacttctgttttaaagctattgaaatccgaagattatgtagcttatggaaatacactgattaactttgccgaaaagatttctctgactccctttccttttgcttcaggaatcagtggaaatatgaaacagatgaaacgaagaattctaaacattgcatcttatgaaagaccgaacttacaaaaaaagctaaaaagtattactgcttttctgctgctatccattctacttctcggacttacaccgtttgtttctacttatgctgcagatgaaaatcactatcattggaacacttcctcaaagaattattctgaaatagactttagaaattattttggaaaatatgaaggcagttttgtattgtatgatttgaaaaaagatacctggaaaatacatgatatggagcgtgccactttacggattgctccaaattctacctacaagatatacaacgctttgttcggattggaaaaggacatcatcactccagaaaattcttttatcaaatggaatggaatcacttatccctttgaagcatggaacaaagaccagatattatcgtcagccatgagtgcctccattaactggtattttggatacattgacgaacaacttggagagacttccgttcaagaatatcttcacaaaatcggatatggaaacgaagatttaagcagcaatttctcttcctattggatggaatcctccttgaaaatttctccgatagaacaggtagaacttttaacccgattgcagaatcagaacttaggatttacacctgaaaatgtgaatgcagtaaaaaacgctatccatatctcatcttcttcctttggaaacttttatggaaaaaccggaaccggacgagtgaatgggcaggatatcaacggatggtttattggcttcatagaaaatagaaataatacctacttttttgctaccaatatccaaagtgaacaacatgcgactggtagtaaagcatcagatatcactttatctatcttgtctgatctgaacatatggaaataatcaaaacaggggctgtcgctttaacgattagcaaatcgtgaagcggcagcttccttttttctgattttcgctatatagttgctctgtttctattgaaacgatagctttttcgtaaaaaagccgtactttaatacaatccaaaactggatttgaaaaaaatttcggattctctaaatttatgcactcttcaaaggaaataaatgccttccagttttccctttttggattttgttgtgaagtttatttacattttttgccattgccagcaaaacactttcagcaagaacattcgctgtgccacgactcaaatatctgcgaaactgcatatcctgtttcagttcaccaaaagatccttctgcttggatgcttctatttattctaagaagaattccttcgtcagaaagaatccgctccaaatcttcctcccgatatttcaaaaatgtttttgctacggaaagcactttgtttcgctcttctattggtgttttacagttatttcccttgatgcactctttcttgtaaggacaatctttacattctttacattgataaatgtttttttcactgatatatccggttttagatttagagcgacggagatgtgtaaagggcagctgtttcccatttttacaaatataagagtcacttttttcatcatacttcatattttctatacggccgatgtcgtttttatattttctcttttttgatatttcataattcgatggtttgataaatgccaactgctgattttgatctagaaatacataattctcttcactttcatatccagcatctgcaatgattttttgatacttaaatgtcagatattcttctgtttcctttaagaagggaattaaggtggtagtatctgtgggctgtggtccgattgtcagccatacaatgtattcagaatcaactccatgctgtaaattaaatgctggctttaactgcccatttcccattgcatcttctttcatccgcataaaggtggcatccggatcggttttagaataactgttcctttttccacaaatatgcagtttttttgtatatccttttaaacggtccagatagtcttctaatgtttcgatactcttttgcagctgagtttttcgtttcccaataccatgtacaaatacaatgttttcttcttgttttaatgcgtacagctttttgcgtaaccgttttacgtgtttcattttaacagtatcaccgtgaacaatccgaataccataaagttgctcacattctgcaatgagatcggcgattttaatcagcaacttcgcctgatttttggttaccgtctttttccatacaaatgtatatttattggcgcaggcttcgatttttgtaccgtctataaaaatcgtttctcccgaaatttctccaagtccgtaaaggagattagacatttcagcgagaattcgtttcgcacacggagcaaaatgaatacttcggaaacgggcaaaagtggcatggtcaggaactggttttccctctaaaagatacatgaaattaatatctcgcttacagttcaattccatagagcgagaggaataatcaccattcatataggaatataaaacaatcttcaagagtgttcttggcgatactgtatttattctttcataagtagaatataagtccgttaaatccatagcctccacaaactgactcagcaaccgcacagaatcatctactggaataattgtttctaagtttaaaggaagttttagttgatatccttcctcattcaaagtataattcttgtgtaataatataggggtttgcatacttatattttacaccaacagccaggcttttcgaagcctggctgtaattttttgcatagaaaagaggctgcgcactaattatttagtgcgacagcccccctctctattcatctgaaatcaatgtacctctttttgaacctatttaatttaccagaaagtctgttgtaagtcctttgcctcttttgattcgtaatcatactggtacatatctaaaatttcagcatccatcatactccatgatccatctgtactttttatatttttataatacacatattgtgcctttgttccttcttgattatcacgatcatacattagatatctaatctgcgtttcatcctcgaaggtaacgatatagctataaccctttgcattataatcttttctatattctgtatcagcttcttttatataggtttgatatactttcagataaccttcgtctatttttttgtttttttctgattcttgtttatctacagctgtcacatcgtccagacttgattcatttccattttcatcttgatgttctaattctttctccaaatccccatactttttacttaaatattcctgttgtgtaattgaagcatctatgtcttctattccgtctgtatttcttaaaaactgaagaaccagaatattttcttctttgtacagtctaaacgatggtttatctagccacacaggagttttaactatcactgttccattactattataatgttctgaatcgtcatttaacatgttcgcaaatatccccaatgccattgctagcgctacgattaatccgactgtccataaaagaattcttttcaataaagacttctttttattcgtttttattatcccagataaaacacaagtccatataacaattaaacatagcagaattaaaagcagtatgataggaactgttcttataaaccataaacgaaaaatttctccatttgataaaggatatccgattttaatgcccgtatatatcagtgaaacaataatagtaatcatcgtagcaaccaccaatatcttcattttaaaagacgttttattttccgtttctaactgttctgtctctacatcttgaataaaactgctgagcatcattagttcattttcagatagaacatttttattgatcaatataactttattgtctttatgaatcaaataaatatagttttcaatctcccccttgctaacaaatgaactccaatcattatgtgtaactccaatctctgtgtctatatccacaccttcttttgaaaacacatattttcgctcactattcattttctgtttttctttatttatgattgctctcataaatactttttgtaatttttctacacttaaacctaacgcagcaaatccaatacttaacaataaaaatatccatgcaaatgatatatgaaacaagtatgaataaaatgctaaagaaaagatataaaaagcactcaccaaagttgtacctttgattactttattaggctttatagtttttaatgaattaatatgcattaaaatattgtttgcttctttgtctatatttaagtgatatataattttctgatcatgaaattcttcaactaccattcttgatttctcccttcacgcgatactgatattccgggacattgtttctatcctctttccggatttcatttcctaaatattgaaaactcccatcttctttgaattccactgttaaatcatgcgtaataagagcatcatcacagataaccatgtcacatactgcattcaccgttaatgtaaccgtactatcaggattttctcttacttccaccacctctggcacagaagttccaaaaaagttcggatcataattgccgcaccctaatggtgcccatgtataactgtttgttttttcatcaaattcagcatattcctgtagctcttcttccgatattgaaagatattccatcatcaaactttcaaattcctctttgggaattccctcctgatatttttcggaaggaaatcgctctccatatttcattctatataagtattcatacaagccattataatctaacacatctaaattgtccaaattccaattagaacataacagattatttccctgatacccgatactctgaacacataatcttgacatctctttctgttcttctgctcttggttttaccctgatcatctgacttccatccatgatctctgtaacttctggcggttccggtacacataattcataacaaaaccatccattatctgtatatttccattctttgattcgggtataactcgtatatgcaattcctggcttatcaccttccatccaaactccacttgtactgactacatacatatccgtaccatcataactaaatttcatcctactgattccaccatcttgatgtacatcatagataatcaccgaaccgctttttcctttttcacaatcgataagaaattgctctgcattttcatagttctccatatcagagtagggaacagttgccgagaccggactgcctgtctccatcatagccttttgcattccaagcatcgtctcatcctgtagaacagcgttagatgccgttcccttatctgctgacttatagatatcctgtatctttttcatcatctctttacattgtgtagctgcctcctcctgttccgcttcatccaaaggcagattataacctttctcccactgttctcttgtttcttggtttgtgtcttttatttctttggtattccctgcaatcatattttctgattccgatttccttttctcacaaccacataacaaacacccggctatcaataccatcattagaatttcatatccttttccgaatttcatctcatcatccttccattcttgcgattggtggcagttccagttccttcaaatcctgcatatcctaatttttctaccacttttttctttgttcatcgggaaattgtatccctccaataacattcttttgtttttccggaacaattgtttctttataaatattgcttactaaagtagatgttgacaatactttgttctgcagctctcccttttcttcatcaggaataagacattcttctgcttgtggaactaaccaatacggtgattctttagctgatgaatctacaacatcattttctccctcactttcttttatgttctctatctcaataggtggttcccatacttcttctgtttgaaatgcttgtttttctggataataaactgtttttgattgcaacatttcatttgcgatattaaatttcatcataatcaaaatttttctttagtaatcaaataaacggcacttgttcctattgcatttcctgatacaaattcactgttatatttataattctcctgacaacagatatcaaaaacatcataaaaatccaattctccaaaatcttcttcatatctgcctctttttaatcctacaaacgtaatcttttgccaccccttaaatattacacctgtaagatatctaagtcaattgtttttataaaaatgattttctttataaagtccacctttactgtaagcgcttaaatttcagccgttgatagaaaaatatccggctacttttcagtaaccggaatactttcataattcacatatgatttattattgatttgagttttctgctcgacgccctatctcagcttttacttttttattccatggagcaagttgatctaattcattgccactcatactatagcactggcctgagcaccatgaggtgtatcgcaaaacagccagcttttctttttatgtgcttaagaacataatcgaaaaaactggttgttttcagatagtccagatggagcaactgcaaatgcgatgtatcttacaattgttgagatggcaaaagcatacgatttaaatctgtatgaatatttaaagttcctgctagagcatcgtcctaatgagaacatgacagatgaagagctggattatctagctccttggagcatagatgtgcaggagcaatgtagcattaaatagagtaaaatgttagccttccagaatcctagcaatgggattctggaagtatgttttggggacaccccgaaactatgcgcttacctctattcttaaaatcactttttggattgatcctgaattgtagtataacagtttttttactttttttctatctcaccctttttttcttccctgagcctttcgttatatgggaggaaaattctgcctgttcagaagaagatgtaacaatatgcttattttaggattgctttgcgtgaaagagactgaactcgtcgtcgcagaaaaagcatatgaaatggctataaatggggaaccattggaaatctgtcactgggaaagtccatttggcatgatcctgctgaacggaagcaaaaacgcagaggtgctttgtaatatgaacgcccgctgggaactttttcgataaactttgagcgtaacacggacagagattggaacttatacggactttctctgctgcagcaaaccctccattccaaccgttggaaacggccggagctggagcaggcggaagcgaatttctctggaagaattatctgatcaacaaagtgaagaaaaccgtaggctttcccgttgaccggctggaaaaaatacaggctgcctttactgactttaagaaagaatcattacagagaaaagggcggtaaaacaaaaacagccagatcgaaagaatttccggactggctgtatcatcagagtaatctcctccataagcaaacctgcacctagcagtatttatcccgttgccgttgaatctaatgttactctttctacttttttatatgctttgcgccaatttcatctttttccaattcatgtaaccgtaaacatcattaataaaaaatatacaaaaacatatgacaacagagacatacatcgaattatctagtgaagctaaataccacaatataattagcactaaatcattcgctgcataagccaatgcataaaatgaacttctcttatatgttagatatacagcaataaaactagtagcgattgatattgtactgaaaaacagattagaagtattaaaaaatttaagaataaaataaaaaataaaagttacaataattgttagaaacatcataaatctaacttcctttacagtcaacgtttcaatcttcacttcattgttattgtcttcgtatggatttttcaaccatgtaattaatgatagaatcgccatcggcaaagtcatccctaaatatgtaagcatttcaccgtagtaattaaaagtgtaagagatatatccatataataaactaaaaattatcatcaataattgaccgattgcatttcccttagcacagaaaattaatgatgtgactcctattaaggatgctgtcaaaacaaaataattattcgtatcaaaataaatgaaagaactaattataataaaaatggagcaaacccatagaaatatttcatagcgtgtaaaatagtttgttaatttcatcacattttctcctaaactatgcttttgtatgattaaagtatgcggaacagattgtttgcacgcactcatccagaccaagcgagccactattcagacacatatcataattttgtgcatccccaaattttttcccagtataatgctgataataggaacaacgttttttctccaacttttccaggtcgtttaccaattcatggtagcaattttcaacacgctcttgtcttatgttcgtgtccgcatagacaaaaacccgaagaagatgcggataatcggctaagattgtatctgcacaacgccctacaattacacatccactctttgctgcgatatctcgaatcactttaacttggtgcaaatatactctatctgtaatcggaagcgtgacatggttatccacagaaagtttgtgaaacagtctacctgcatcctttgtgtcactattctcaaaaaagctgctatcaagattgctctcctttgatgccagatcaataatttcttggtcatagaatggaattcccagccgttctgccacttttcttccgatttcacgtcctccgcttccatgctgtctgctgattgtaataatcgtatgttgtacatcatcctgacttttgcttttcgaacccttcaattcaccagcccactcaaagcctttcttggctgttattacagcaatgacctcattgattaccgctgccgctgcaatagttccctgaacaatttttgcacactctggcgcgggtgtagtcaaaacagaaacggcaatacccgtaaatacaagagaaacgccagaatgcggtaaaagcgtaagacctagatatttttttacagtttctggagactttgaaatacttgcaccaaaatatgctccaaaatattttcctgttgctcttgtcaaaatataaatggcagtaaacagacctgctccaaaaatcaagtgatagtcaagaggcgcaccaagattcaagattactacaatcatggcaatgcctaaaagaggattgaatccttccaggatctgttccagtcttgtttcagaaaccatattggaaaatgttgctgaaaaagccattccaattaacataaaattcaaaacgggacgaggcaataccagtgtgttaaaaataaatccgacaccagaggctactataatcattgtcaacagcagcattagtgtaatcgctttgcttcgctctttttttaaaacaactcccgctgccaggcctgttacaacaccaatgagtaaaggcaaaaagacaacaatgactatcatatatccaggcagatcacccgcagaaagattgcctgcgacaatcgcaatcgtcgtgaaaaaaacaatacaacctacaatatcatccagagccgccattggaattaatgtttttgtaaccggtcctgtagtcttaaattccctaacgatagacagggctggagccggtgctgttgcaagtgcaattcctccaaaaatgaatgccaaataaactgggatatgtgatacataaaatatgatgccaaaaacaagggaaacaacaagaaatgtccccaatgactgtgtcagcgtggtaatgataatagccttgcccgaccgctttattttgttccagacaagttctgttccaatcatcaaaccgacaccacactcaagaatatgtaccatcgtctgataccattgtgcgtccaaaagctgctgattcatcagtgacaatgcgtggggacctaaaaccattcctgtaagtaaccatcccaatatggacggtagctttacttttgaaacaagctttcccacaagaaaagcaatccctatagtaaacaataatcttaaaaataacaaaaacatgttattcacctaccctttcgtaataatatctccagagaccaaatattcaaatgtaaattgctctcatcaaacctcttctttcttctctattggttcttttgcaatcccgtaaagcataatatcaaatatcacagacaatctgccttcatggtctttaaccagtttccgataatctccacttttcccgacctttttctgaaaataaccatgaaacatttcactggcaatcaaaaaatattccaatgccatcccttaaagacaaacaatccaaaatagcaagatagcactggctaaaacattcatcgaacccacaacgcaactccataagttcttgaaccagatgtttcagtggttgtaacactgcatagaaaggattttcctggaaaaatttttgccttatcatcaaaaaattttgcagagccatcttagcatcttgaatctcaaaagtttgtgccttcaaagtttccaccaattcatcataactttctttacacaaagcaaatataattcatcttttcctttaaaattgtggtagatgagcccttttggaatttttccaatttcacagatgctgttaattgacgctgtatcgtaacttttggttccaaattcttgaagagctgcagcaagaattcgttcttttgttttctgagttttttcttgttttttcatttcttttccctattattgactgcatggtctattataagttataatagaccatgcagtcaatatataacacataaattctataagttttacgattaattcattgtacaaacttttcagctatgctgtttatatcatcaatcaccagattgctcttacttagatttatgttattctaaatcaaacataaaggaacttaatagcaaaatagtaaagataattcctatctttatacaaatttaatagtccatcatatatactacatatagaaacggggtagaaaaaatgaaaatattaatcgttgaagatgataaaaaattaagagattctctttcagaaggccttctcttaaaaggctatgccattgatatggctatagatggagaaagtgcggatgaaaaatgcttttgtgaaaattacgatctcatcattttggatctgaatttaccaaaaatggatgggttttctgtactgaaaagcatccgaaaagaaaaactggatatacctgtattgattctgtctgctagggataatattgaagacaaggttaaagggctcgatctcggagctaatgactatctgacgaaaccatttcattttgcagaattggaggcacggatacgctcgttattgcgccgaaaaaccgtgctggaaaatacagttttgtcaagtgactccctttattttgatactgtatccagaactgttactgctgcagattccccagttgctctaacctcaaaagaaaatgctatactagagtatctgctactacacaagggcagagtcatcaagttagaagaactaattgaacacgtttggaatagtaatgctgataccttttctaattctgttcgagtccatatgtcctcacttcgcagaaagttaaaagcacaattgggatatgatcccatcgacaacatcattggagaaggttatgtaatccggggaggaaaaaaatgattccattaaaactgaaattaaccgctgtctcggtatgcatttttaccattatgtgtgtcgtgttggctatgtctgctattttctcagctaacaaattagttcaagctactgtcaccacaccagcgatgtccattgacggagatatgccagcagttttattgaatgaatcctctaccgtagagcctgaagcaatcgggcaatttcaaggaacaaccgtagtcgttatgctatgtactattgctcttggctctgtttttacctatatatttgcagctaagacgctcaaaccactggaagatctcaccgaaagggttcagcacattaccatccataacctgaacaaaggtatcgaaatacctgaaacaaaagatgaagtttcccgattagctcaggcatttcaggatatgaccgagaaactcaatcattcttatcaggtacaaaaaaatttttctgccaatgctgctcatgaactacgcactcctcttgctgtcatccaaacacaattggacgtatttcaaatgcgaccagatcgcaagatggaggaatataatgctttactgcaaagtattggtgaaagcacagatcgactgtctcatctggtacaggatttactcacatttaccaatgaacagaaaattaataaaaatagaaatgtagaattgaaatccttactagaagagattgtctttgagctggaggagtatgcaaccgccagacaaattgaaatcaacatcaccggaaaaggaaccgtctccggtgacgatagtctactgcagcgggcattttataatctgatttccaatgcgattcgctacaatgtagatggaggttccatttccatcgatgtgtccgatgacaaggtaactgtggctgacaccggtattggaattccagatgatgcgaaaccttatatttttgatacatttttctgcgtagacaagtcccgcagccgggaactgggtggaagtggccttggactgcctattgtaaaaagcatcattgaaaaacacggaggttatatctgtgtagataataatcaaccaaaaggcagtatatttaccgtaagcttcaatcgttataacttaaaataaaaattgtattacaatcaaagcagtttttaaaagaagacgctggaagaaattctggcgtcttctttatatggatttaatattccttgtgttatactcctcatgtaattacaccataacaagaaaggactgtacttaacatgaaaaaaataatttcagtatttttgttactgacgatgacactcagcctgtctgcctgcggaaaatctgacacagacaaaggaacttccattaccgattctgatgcaaggcaggaatcctcctcgtcagaacagagtgagtttgtgcctgttcctctgggcgacttctccgcaaaagattttgagggaaataccgttacaaaagatatttttgcagattacgatttgaccatggtcaatctatggacaaccacttgtagctactgcattgaggaaatgcctgtcctgaatgaactgaggaaagaatttcaggacgacggtgttcgcttcaacatcatcagtgtctgcatggatgttggtaacacagaggagattaatgataccaacttaaagaaagcaaaagaaatcgttgaaaaagcaggggcagaatatcctgctttgatcccggacagtatactgctagaaggccgtttaaaaggtattcaggcgttcccagagagtttctttgtagacagggaaggaaatgtagtcagcgagccttatgtgggcgctatgcccaaaaatcactggcgcgtgacaatgaagaacgagattgaaaaaaatgcgaaggaagggaataaagaataaccatgtttgaattaaaaaatattaccaaagtctttgaaaaagaaacagcacttcgtgatgtatcgctctccatcaccggaggcatgaactacatcactggtgcatcaggcagcggaaagtctacgctgttgcgcatactctctgccatggatacacagtatgaaggcgaagcattttaccgtggcagaaatctgaaagaactaacacaccaggagcgtgcacagctttatgcaacggaactcggcttcattgctcaggactttcacctgattgatgaactgactgtccgcgaaaatattctggttccggcttatctgaattcaaatgacaatgaaaagcgcctgaatatgattttaaaaaagctaaggattgagaaactggctgatcagaaggttcgttctctgtccggtggtcagaagcaacgcgtagccattgccagagaactgatgaaaaaccccgctgtactgattgccgatgaacctacggctgcattggatgccaaaactgcacacgagattggagagctgctggcattgattgccaaagaacgaactgttattgttgtgacccatgacacttctctcattcagggcgaatgttctgtttttgagttggataaaggtattctgacaagaacagacaaagcagatcgaaccgcaaaagctcataacctctcaacagagccttcacgtctgacactaagctcagctttacggatttcaggagtgtcagccagacgtcagatgggaaaacttctttctattgttcttgcaatgacgatcgccgcatcctgcctggtcgtgaactttagtgatatgctaaatggaggcagcaataaagcgtttcaagaacttttgaaaaaacaaggaaactctgttctaaatcttcttcttgttccttcgttcacaagcggaggggaggtaggaaacgaaaatcctgatgttccacaaagtgtagaacaggatatcagcggacttttagaagaatacaaaaatgacagccgtattgaagcagtccttatggacgcaccactggatgatatagttgttaccgcagatgggaaagactatattattgaggaaagtggacagtctcccaactacaatgagatggttgccggccgcatcgccgataacagtaaaaaagaaatcgttctgcctcaaattttagtaaaaaaaatgggttataccaatgaagagattcttggaaaaaaactttcctttatcggttcggtctataactgggacagcggtgaaccagttgcaatgcctgtttcctttactgctactgtttccggcgtagcagatacctcttatggcattgaatttgaaggcaaggttgaacgattcgagcatgaggattccctgtttccatcactggctattatggaagatatttatgctcaggccaaaaaagaagatcccagttttagttttactatacgtgctgattctcccgagcattttttggagctctatgatgaattaatggagaaaggtattgttcctctgggacatattgagctaattcgtgatatcgtgggattaaagggaactacactggtacagacaggtgtttcccatgttttgattgccatactttccgtactggctgcactttctgtctgcctggtctgcagcctcatgcgcaggaaggaatatgccatctatcgtctctgcggctatacaaaaactgacattgccttgctgacactggcagaatacacaggaatgttcctgcttaccggactcttgagtgtgattgtagctttgctgcttggtgtacaggcatggttgggatttgtgcttagttttggtgtatctgtcggttgtttggctgagacctgccttatttctgctcttgttaatcctctcactgctttaaagacaggagtacgcggatgattaagctgaacaatatttctaaaaaatatggtaatcaaatcgtactggatggtttttcgcacacgtttggaaatcacggcatcacctgccttttgggggcatccggatctggaaaaagcactctgctcaaccttctcgcagggtttgaccaagagtacaaaggaaaaatcatggtgaacggtcaagagctctctaaactgtcaaaagaagctctttgtgagtatcgcaggaacaccatcggttttgtatttcaggaatatcaccttctcacaggctataccgtattagaaaatatccttttggctgcagaactggttgataaggataaagaaaaaaacagagaatgggcacttgtgatgctgcgtcgtctcaatcttgaggaaaaagcaaacgagaaaatagagaacctgtctggcggacaaaaacagcgtgtagctattatcagggcattggcaggaaatccagaactgattttagcagacgaacccaccggtgctctcgaccgaaagacagcggatgaaattatggcaattttttcggaaatcgccaaaaagcgcccggtcttaatcattacccatgaccgcaaaatctgtgattatgccgatgaagttattaccatagaagaaggcaaatgcagagtattgaaagagtccgggaatcagcccattgcagtttctaagcaaccagaaaaacttcctgaaatcccctcttctatagggaagatagccttgcataattttcaggtgtatttcaagcgctttttaggaatttctcttgcggtaactatagcagtatgtgcggtactaatgtcattttcttcacaaaatgtaatagaagaaaaaataaatacttttaaggaaaaaaataccgctttttcctggggacaaatttcactggagaatagcgatgcttcagagcagttgctttctctgcttagacagtctatacatgttcagcagtgttttgcacagtatgtggttccggaatgcaacattgaattcgatgggaaaaaactttcaattccggccaaacagttcggcagcatttctaccgaatctatgaatgttggaatcatgcctgtggatgaagagattgccatcactccatcccttgccaaacagtttgctcaggatattcgcactcttattggcaaagaggtaaccttcacttgtagtaattttacaaagaagcttcgagtcagtggaatttatagcggaagctttgatgattactatctggattcagaaacggaacaggaactttacgcttccttacaagaaaaaactccccctgtatcggtaacctatcaggtcagaagtttcgatgaggtttcagaggttgaagcacagttgttaaaacaagacattacccctgtcacttcttccagacaggtggacagcctaaaagaaacctttgcacagttacaaacactgttcatggttgtttctgtatttattgtaacaatttcacttaccctttgtgggatgcttctaaagaaaacagcacagatgcgggctcgtgaaatcggactcttcatggcacttggataccatcgatcacagattcaaaagatgctccttggagaaagccttctgttatcggctctttctgcactgactaccgcattgattgctctcatgctcactgcactgtcaggtattttacccattcatatcaccatccctcaatttgcactgagcatctgcggcacagttcttcttgtatggctcataaccgcatgctccaatgcaaagttactaaaaacagatccagccaaatcgctgagacaataaatatctttaaggaggaactatatgaaccgaaaagtcaccttgcgttccagcgggattacgatcttactcttaaccatcggcatcgcatttctggctattggtatctgtcggaaggaacacgctattgttatggcaaaagctattaatatttgtttggagtgtataggaattggatagtagaacaaaaaaatcagaacgattccgccatttttttcaggttttatgggcggttatcacaaatagttatctcattggatttatccgaggaaaaatatatcagggaaagattaaaaatatctgtgtgccgggcatgaactgttattcctgccctggagctgtagctgcctgccctatcggggctttacaggctactatcggcagctacgagtataaattcgccttttatgttgccggatttatgattctggtcggcacgattatggggcgctttgtatgtggctggctgtgtccgtttggtttgattcaggatttgttaaacaaaattccacttccctctaagatgaaaattcatacattcaaaggggaccgccagttgcgctggctaaaatacggtattcttctggtatttgtcattcttttgccgctatatatcaccgatataatcggtcagggttatccctggttctgtaagctgatttgtccggtcggaactctggaaggtggaattcctctagtactgctaaatgatgccatgcgagccaccgtaggatggctatatgcctggaaaaatgtcattttgattgtaacgattctggtgtcgattttgatttaccgaccattctgcaagtacatatgccctttaggagcagtttattccctgtttaatccggtttctgttctgcgctaccgtatagattcggaaaaatgtgtcaactgcggtacttgtgcaaaggtctgcaaaatgggctgtaatcctgtaaagaacgctaatagcttagaatgtatccgatgcggaaaatgcaaaaatgtttgtcctgctaacgcaatcgaatattgtattttttcaaaatctctgaataaagatactaaaatctgaagattataagcctgatatcgtgaacaggaacgtaaaatcactgttcctgttcactttttttcttttaaaaagtctacggttctttctatagcaggtccaataacttacactaccactgtgaaagtccttttgattttcgcaattttttaatatttttatttagcataacctatgtctcctttgttttaatacaatcattaaatatcaaaacagccattacggcaagcgacgtaaattaccatttactattatagcatcaaattcaggattttcatattaccggatttttactttttgtctttatatccattctttattatatcagttattaaatatataaacgcaggaatcaagattataagcggaataaccgttcctgctggcttaggtaaaaccaatgccaatattgccgcaattgcaatcaaaattaaaattgtgtttttcttcattttcatcacccttgttgtttttttattctatatcaactttccttaattagaaatacgcctaataaaagaaaaaatttccatatttgtcattttttaagacaagaatttcttttccccagggataaaaatgcaacccggcattttaatctgcaattcccgttttcctccttgcatttttcttttttcctgctttatataccgctgttatgacagtgctttttcagcaagtcttgtttctccccaaggtgttttcaacatagtgtcattcccaatgattcctgcccggacaatctctataggttcttccagttcagaaattctgatgccgttgatacaggcattcgactgaaactcctcaaactcctcgaatacctgatcctgaaatataaaggaaatattttcttttcgctcttctgcttccggaggaaccacacaggaccccataagatataccccttcctgataatgaaattctatcagggtaaaagacattcctccatcataatccgatcggatgatctccattacctcttttcccataatccataatggtttttgttctttctttttaaatccaaacataaattgttcctttccccatttttatcttttatatctttctccttagcaaaggatgctttaaaaatggaggtatccacagcaaacggctcttataatttatttaatacatattctgctcttctttcttccactttttataattatacatagcctggatcagcagtatcattgcaaaagcaactgcaactaaaaatgtccaaatagttgaccagaatgtgatgtaaaaacaaagaacaatgaaaatggctattgggatcatccacagtgttcgaataagttttcttctataacttaatttccaataacacagctctattcctttatcaactttttcgtgcttctcccatttcttcgacattaatgcagaagtaattattgctataatcccaggaaacaaaataagtattaattccaatgcaacccctcctcgtacattttgtttattatactttttttgtgtaaaatttttgcgtcagatcacataaaaatgcgtaaaattttcttgttttgaattgatttatagacatatgttatttttacttcgtaacataaaatttaatacatttctataaagactcctaccattttactggaatctatagattagtcccacacgatttccgagcattcaaaattatccggaattggtggtacgcacgaataagcacttaattcaactgcctttattttaattactccatcagagcatagccattcacaatttactaatttttctaattctgcaggcgaaatagctgtgcaaagtacaattgtatctcctgcaatggaatcctttttcagaaagttctgcatcactttcagatttttagcgtattcttctggaagttcctacaaaatcttgctacaatttaagaaatgatctgaaacgaacaggcagggaggaacagacaatgttagaaaattcactggcggaaaaactgattgaacaggttaccaaatataccagctataatgttaacatcatgaatgagcagggagtaatcattgccagccgcaatcccgagagaatcggaaagtttcatgaagttgcatggcagattgtacatggaacaagtgatattatggtgacggaaaatgacaatgaatacccaggtgtgttaagtggaattaatatggtaatcgatattgaaggaaagcgggagggagtagtcggtgtaacgggaaatccggaagaaattcgtcccattgccttaatcatcaaaatggcaattgaaacactgatcaaatatgagaatcaaaagatgcaggcatttcgaagacaaacgagaaaagaccgatttatggaaatgctgacacaaaagcaatatcgcgctccacaggatattcagaaactggcatctgaattgaattacagggaggatttggttcggattccgattctttgtcacctgcagtcacctctacatcagaatgcctttttatcgtccataaaaaacagtccggcacatctgacacaagacatcagtttcaaaatcgaagatcgttatattctaatcttcaaaacattgaaagaggagcacctgttttctgattataagtttttactggcagactatttgaaaagtacactaaaatggatgcgtgaagaagggattgtgtgcacgttttatataggaacatttcagaccagtttttcgcagtattattatgcgtaccagcactgtaaatggttggaaagacatgcgtcgggagagcatcaggccttttatttttatgattttaccggagaatatctgatgtcttgtattccacgtcaggaactgcagcagatatttaatgtgtttgcaaaggaactgccagatgaatttcagaaaaattatattgaaattgcaggcagcctgattggaaataattttaacatccagaatgcagcaaaacagtgttttatgcataagaatacatttacttaccgttacaataaaatccgggatattttgcgcgtggatcaccagcgttcgatgtcagatacatggatgctgatcagtttgtatctgtatctgaatccatagaacgtgtgttttgtgtgcgggatacaaaatataaaagaagttttggtcagcttcttctgaatttttagaaaatcttctgctacaatgaatacaataaaataaaagcaaaaaacaaagggggatttattatgacaggattaccactcatcatcgcttttattattgcaattgtagttatgattgtagctatttccaaatttaagattcatccgttcttatctattatgggtgtttctttgattctgggattggttgcagggattccgctagtggatcagacggcaacggacggaaccgttaccagtgggttagcgaccgtgattggagctggattttccggtacatttaccagcatcggtattgtgatcattcttggagcactgatcggaagtattctggaagaaacaggtgcagcactgaagcttgcagatatggtcattcatctggttggaaaaaatcacccggaattggctatggagctgatgggatgggttgtttccattcctgtattttgtgattctggatttgttatcttaaatccaatccgaaaagcattggtaaaccgaacaggtgtatcctctgttgcaatgtcagttgcactttcttgtggcctgtatgtctcacatgtatttattccgccgacaccaggaccgattgctgcggcatcaactcttggaatcggggacaatctactgatggtgatgggaatcggtgcactttgttccgtacttccattgattgctggatatttctttgcaaaatacatcggtaaaaaagtaaaagcagacgacgaagcaaactgcaatgatgtaaaaaaatcttatgaagagttggttgccgaatatggaaaacttccaaatggatttgttgcacttgcaccgattttagtaccgattctgttaatggctgcaagttctattgcatctatggcaggctggtccggagctgcaaatgatattctgaagtttttaggaacgccgatcattgcacttgccgttggtacgatttttggagtaatccagcttgttggagcacagcggattgacaaattctataatttgacaaacgaaacattaaaaacagtaggtcctattctgtttgtaacggcagcaggtggtgttcttggaaaagttattgcttctacaagtatgattgagtacattacacaaaatgcggagttgcttgagacgattggtattttcttcccgttcattctggcagcaatcttaaagagtgcacagggatcttcgactgttgcattgactacaaccgcaggaattgtagcaccaatcttgcctgtacttggactggattctccaattcgggcaacacttgcagtgatggcaatcggcgctggtgctatgacagtttctcatgcaaacgattcctatttctgggttgttacaaattttggcgcaatgactcccgaaaaaggatacaaaacacagaccatggcaacattggtacttggaattgccggcatgattgaaatctttgtactttcactcttccttcactaaaaagatactctataaaaagggaggctgattattatgaaatttttatttgcatcggattcttttaaaggcacgttatcttctgcacgcattgcagagttgcttacgacagctgctaaagaatcgtttccagattgtatctgcacaagtgttgaaactgcagatggtggagaaggaacgacggacgctgttctgtgtgcagtgaaaggcgaaaggattcctctgactgtatgcgggcctctctggaaacctacggactgtttctatggaaagttggatgaaaatcgggcgattatggaaatggcagccgcatccggtcttccactactttcagaagcagaaagaaatccggcaaaaacaacgacatacggaaccggagaaatgatccgagatgctttaaaccatggttttcgagatatttccattgcaattggcggatctgccacaaacgatggcggcatgggatgtatgtgtgcactaggcgtccgttttttggatgaaaatggaagagaattagaaggttgtggagaaaatctaggtaagatttccagaatcgatctttctgaattggatccaagagtttcaaaaacaaaatttaccgttatgtgtgatgtcaacaatccactttgcggtgaaaatggagcaacttatacatttggccctcaaaaaggaggaagtccagaacttttaaatgaattagaaagcggaatgcttcactatcgggagcttcttttgaaagtgttccaggtagatgtcaatgaaattccaggtgctggtgcagccggtggacttggtgcagccctggtcgtatttttgaatgcaacattaaaatccggaattgagacggtattagatctggttgattttgacagtcgtctgcagggcgtttctcttgtggttaccggagaggggcggacagactggcagtctgcttttggaaaagttctccacggagtcggaatgcacagcaaaaaatatgggattcctgttgtggcgcttgtaggttccatgggacagggggcagaaaaaatctacgagtcaggaatcgactcaatcctgactacagtcaatgcccccatggaactgcatacagcgctggaacaggcggaagaattgtatctaaatgcagcgagacgtctgtttcgtatgctgaaagcaggaagtcaaatgcaggaaacaaagtagaatccctaataaggacaggagttttccgacattggcacccggtgcatggtaggaaatttcaatccgatgatttccttggtttaaagggaatccaagaaatgcggtattgactttttcacaggagatattcctgccatctaccagaacttcaaaatgagtatcataaggaatggtcgtgataaaataaccatctgattttgtcgtgactgttcctttgattttatctccgctggaagtttgtcgatttatttgaaattcagactgatacagtgtattttccgcattgaacgatgcccaggatcccagaaagattttcagatcagaaagctgataatctcccgttccaagagtcagcgcaatgtccttctgaccttttctgagcggaactgcataagtaaaagtttcattgtggttataataaatgtgggatctggcacttaatttgttccgttctttttccagggtaatggatacatcagaagacggattctgatttttaatccgaaactgcagaaataaaatgtcctcccggtggtcttggttcttcttgccgggaaataattctgtcaaatgtagtcggactgtttcgggctgctgtagatcagccgttatggcatccttcgtttggataagaacgttgccatcttttcttaactttgggaatttcagactccccggtgtgattttcagactgtcggaagtcggtttctcctgctttccgccctcttctatcactgcgtaatccaacaaggttgtctgattatatggaaagcccaatgtttcataggttttttgattcaataaccgattcgttgcatatgcgatcggcgatacacgatcgttttgaagtatctttgtgtttcccacgatccccattttttcatatccgggaatttcttcttgactgatcagatatttaactcccataaaccgttgataaactgggtttctagaagctggctgcatcagaaaattccggtaaggttcttccagttcaaaagtttctgtacgaaatttctgatacgcttcattgtatacagaagaatatatagaactgctgtgctgtccgatagtttgaatacggttcagatttgcaaatccctcctgatttgttccaagttgttccattcggcagaaagtatcgttcgagtctacaaattcgattgctttttttgtatcatgagtagttatcttttgataaaaatctacatccagcatatatcccgcttgtgtctgaaagaaataatcatagatgctgagaaacagaagcgccggaatgaaaaggcataaaattcccgtatactgtaagaatcttttgcacccccgggtatgcaatcggtggattttgtaaaaaaacagataacagaacatcataaaaatggcatcaaggaataaaagaactcgactgaattttggcatggaacttgtatctccgatcagtatcagaacagccgtcagaagatacggtagaattccatgtcggaatggtcggaattctttttgctgtttttggatataatacgcaatcaggtaacagaaaagcggcaaaaatggaatcaaaaccttatcccggatgtataatccaccattgaggagatacgaaaataaaggtatcgtcaaaatgaaaatcaacccccatgcaagaatccgctctccttttcgtttccatgtaattccggcaagcaaagctgtcacagccagtgtggtcagtccaatgccatacgggtgatacaaaaccgcagaaagtttgatagaaggaatcaaaagagacaaaagcgttgtatctctgttttcgcctcttcctcctgtcaaagccattgcagtcggcatcaaaaagaaggcactcagcagaattgcaagcagtatggggtacaaaaaacgaatccaatcttggaaaaaactccaaaggcggaggtcttcttctgataaatcctgcagcagaaagtatcgatgcatcccatataaaatcagaaccagaattcctccaacactgaaataaaaactggtcaggatcatgaaaaatacactcagtatataaagaaacgaactccccttttcgagaaaagaatctacgccccagagtcccatacataaaaatggcatatagtttacaaacataatctggttataggactgaaaaatcataggcgctgccagtagaaacaggcaggccgtcagaaaacagatgattggggaaaatcctctttttttcagccagcagtaaaacaaaattatggaagcggtaagacagacaaaggatgcagcaatcagataatcactcatttttacaaagggcaacaggtacgaaagccagaaaacaggactgtacaatccgtaataagcaaaatgatagatattttgtccgcctcctatatcaagggcaaattccgggaagaaatctcccgtatcgtaaaattgctgccggaaatagtccggaaatacgctgtgctggctgatccaatctactttggaaccaaacaccccatattttccacaaaataaccaacaaaaaagcagagtcaaaaaaatgaaaagaatgggaacccgtaattgtgtatatctgttcttcatatgttctccttttcactggaatcttttaaaataaagatcggccgatgctttgtctccaggtatgttttggacagatattgcccaacaattcccgtacacaaaagctgcactccgcttaccataaatatgatacaggtaagcgaaggccagccagacacaggatctccccagatcaatgtccttatgataatcaccacgatcatgacaaatgaaatcagacaaaataaaagtccaagtacagatgccagtgatagcggagctaccgaaaatccggtgattccttccattgaatagacaaacagttttttcaaagaccattttgtttcgcctgcagaccgttcaatattttcgtattccaaccattttgtgcgaaatcctacccattcaaaaatacctttcgaaaatctgttgtattcactcatttccaaaactgcatctaccatgttccgcttcataagacgaaaatctctggcaccacgcataatttctgtttttgaaatccggttgatgattttgtagaaactgtcagataaaaaagaacgcattttggattctccggtgcggtctgatcgtctggttgcaacactgtcatactcctcttctatcaagattttgtacatttctggcaaaagtgacggtggatcctgcagatctacatccataactgcaacataatcgccgcttgccttggaaagccccgcataaatagctgcttcttttccaaaattacgggaaaaagaaagatatttacagcgcggatctttttgatgcagttgtttcatttcaagcaaggtatgatcactggatccatcatcaataaatagaagctcaaaatcaacgggattcatctgtttcatgacaggcagcattgcctgataatatacagggagcgcctcttcttcgttaaaacagggaatgattatggtaattctatgtgctttcatgattttatccacctcctgaaaactattatgccgctcctttcttaaaaaaatcccaaagcaaatcttaaactttattaattattatgaatgattgaaatgaaaaaaccggcagattgtctctgccggcagtgtctgctaatccactcttaaattatgaacgaataaaatttgttttgatcttctcctctgctgccggttttggaactccggcattttttccggcttccagacagtgcaagatccatgccatatttttcccgagaacatgcatgatctgaagaccttccttgtcctgcatcacttcatccggtgtgttgccatgaaccatattccaatagttcgaagaaacaaccggcatctggtgaaatgaaaaatattttaagagaacatccagtgttgctgtcgtacctgcacgtctcgcagatgcaattgcagccgcaggcttcagaagcatatcctttccggcaatggaacaaaacttatccataaattctacgatctgtccagatggagatgcccagtatacaggagaaccaacgatcagagcatctgcttccttcattttttcagcagcggcctttacattttcaagcgccggatctcctgcctgaaagatttcactttcaatcccattctcttttaatgcctccgcgatctggccaagtgcagtatacgtacatccatcttttctggggcttccgtttaacatcaaaactttcatttacaattccttctttctttttccttctagtaaatattatagcgcagaaagaacatttatgtaactacgaaaaacagttttgaaaaagaatcctattcttcttcatggtttgcagcatactttttgccagccatgatcaaacctgcaaaatacaaagcagtcagaatccctgcgattatatatgcgactgtcatcggaagaccaaacccgattttctgactcaaaatgaaagaagatataatgaacatataaaaacttcccggaatcagggcaatcaggtaaatccctttttttgcacccttttttgccatcagataaatggtgattgcagcaaacgcaaatacgccgatagtctgattgctccatgcaaagtatctccaaaggatattaaatccttctgcattcatttttgcaaaaacaagaatcaaaataactggaataaaaattcccaatgtcacaagtacacgattttttcttgttttctgatcaatgtgcaagtaatctgccaccatcagacgacaggaacgaagggcagtatctccggatgtaattggaagaacaatcacaccgaggattgcaatgattcctcccacaggaccaagcaggccttttgcaacttcgccaactgctgcagtagctcctgcagtagaaccactgttgtaaagtcccatagctgcagctgcccagatcattgcgatcaggccttccaggatcatcattccataaaagactgtgcgtccttctttttcatgttcaacagaacgtccaattaaagtacactgtgtagagtgaaatccggatgtaattccacaggctactgttacgaaaaagacagggatgaattttgttcccactcctgaatttccttgtgcatcaaaaattggatatacatcaaaaattcctttgagaccgtggctaaaatcaatattgtcaagctgatacccctgaataaagattcctgcaaatactccgattgctgataaaagcaaaatcgcaccgaaaatcggataaatctttccgatgatcttatcaatcgggaacaacgtggccaccagatagtaaagcaagatcacgccgtaaattacccatgtccatacattgacatcctgaaatccgcaaatctgccctgcaaacagatctccgggagtataggtgaacactgcacccacaagaagcatcaggaaacaaagaaaaatattgtacacctgataggttttatttcccagaaatttccggatgattcccggcatttgggctccattctgacgaagggacatcattccgcttaaataatcatgtgtggcaccgctgatcacacatccgattggaatggtgataaaagcaatcggtccaaataaaataccttgaataggtccaaaaataggtccggtacctgcgatatttaacaggttgatcaatgcattcttccatttattcataggaacataatcaataccgtctttcattcgtactgctggagtttcacgatcatcaggtttaaagacatgctctacaaatttcccgtacagataacctccgagtaaaagtattacaagtcctgtgataaaagttgccataaaattttcatctcccatttctttttaatagagtgcactcttttttataaatagtttatactttttttataaattgtcaatagttttttagaatgttttctttgtttttttagagagatgccaagttaacgcgttatctggataaattatcaaaaacaaaaaaacaggattgccgttttataaagcgactctcctgtcttttctgcttacatcagttttctaaataaatttttgagatcttctacacttgcatcttttggattgcccggtgcgcatgcatctgcgtgtgcagattctgccaggaactgaagatcctcttctttcagtgcgtctagttttgtcgggattcctacatccaaagaaagtttctgtaccgcatccacagcagcttttctgtactcgtcaacagtcatctcatcaacacctttgactcccattgcccgcgcaatctcacgatatttttcaccggaacaatctgcattgtattccataacaattggaagcatcatcgcacacgcgacaccatgcggcgtatcataaacagctcctaatgtatgtgccatggaatgcgcaatcccaagaccgacattggaaaatcccattcctgcgatgtactgtccaagagccattccttctcgtccttctttttcatttgctactgcacttctcaaagatctggaaatgatctcaattgcttttaaatggaacatatccgtcatttcccatgcgcctttggtagtataaccctcgatggcatgcgtcaatgcatccattccggtagaagcagtcagtccctttggcatagatgacatcatatccgggtcaacgattgcaatgatcggcatatcgtgcggatccacacagacgaattttctttttctttcaacatctgtgattacatagttgattgtaacttctgctgctgttccggctgttgttgggactgcgatgatcggaacacaaggttttgtcgtaggagcaaccccctccagacttctgacatcctcaaattcagggtttgcaatgatgatgccgattgcttttgcagtatccatagaggaaccaccaccgatcgcaactatgtaatctgcctgagctgccttgaatgcggcaactccgttttgtacgttttcaattgtcggatttgctttgatgtcagaataaatctcataagcaagccctgcttcatccagcacgtctgttacctttcccgtaactccaaatttgatcaaatctggatctgagcagacaaatgctttttgaaaagctcttgcctttgcttctgttgcaatctcctgaattgcccctgctccatgataagatgtttcattcagcataattctatttgccatgtttatcactctcctttgttttgattttaacaactttccacaaaaataaaaagtgacaaagtttcaattttgtcactttacaataaatttaacgtcctaaatacttccattagttccagaggcattgcatctaccaaagaacgtgccatctcctccggagtggatggaatcttaccaagcacccactgtaccgtcatatagattgagccctgacaatacatttccagtaaaaatcgtaagtgcccggtcattttctttttcgttttctgttcaatgcgttctgtataaaatttaaggatcaggtgaaaatcatgatcacgcagacaattctgatcgtcatttttaaaggctgctcgaaagaacagattttcttgtcggatataataaaacttattgacaagtccttcgtagatggtctcaccttctcccatatactcaaaagattcctgaagaattttgtcaaagtaccagttaataagatcatatttgtcctgaaaattgcgataaaaagtctgtcttgtcgtaccacatgtttctacgatttcttttaccgtaatcttttctaccggtgcatttttcatacattccttcatcgcttccgcaagacggtacttcatcttgtgcggaacacagtccaatgagcgatatatttctttcatataagcagttgttacctcctgacctgtatgttattttttaagtttttttgcattttacgataaccaaattatatagtacttcctgttttttgtatatatttattttcgaattcacaaattattttgctcattacgcatacttgttttccacgttccgtattctggtaatctgaataccggatctccatctgttttttcttttgctttttctgtgctttctttttcatatatgtggtagctccggcactcgctgcaactgccgcgattccaatcccaacgtgtttttttgccatagtaatgactacctttccaaaatgtattccgaattttatcggttattttgtttctgcccatatactatgctttttatgcatgggattcaatttacaaattggctcatttgataaaatttttatcactcggcatgttttgataaaaaattttggatagaattagaaatactgccacgaagagtcaaaatgatatactctacaatttcgctataatcttctttcatcccttgtttgatccagtccagcataattcccacaaaactatatttataaaagtttgcgataaatttcttttcatcttttagataacacgtttcagtgacatttcaagtgcctgttttgttgtatttgtcaaaaaatctctccctcttgtttttttattagcatacaaaagaaaaatgaattttacgtgaactttttataattttttgaggggaaatgctatacatctttgctttgatatgctatactctacctcgcatttatcaaatcagggggatttgaccctctggactggttcgtgaacttcccagtataaaaaaccaagtatctcgtactgtcaggttttcctgcagaatcaaaaaagaaaaggagattggagaatgaatgcaaaaaagattatcattgactgtgatcctggaatcgatgacgcacttgccttaatgctggcactgcgttcaccggaacttgatatcttggggattacagttgtctctggaaatgtaccggcacaaaaaggtgctcacaatgcacagaaaattctgcattggatggggcgttcggacattcctgtttatcttggcgaagaactgccgcttgtttgtccctacgtggatgctatggatactcacggtgaggacggtcttggcgaatctcattacccggaaattaaaaatgcagccatacattccaaaggtgtcgattttattgctgacacattgtatgaggctgccagaaatggagaacaagtttcaatcattgcattggggcctttgacaaatcttgccaaagtaatccagaatgatccccggagtcttccgggacttggagagttgatcagtatgggcggaagctgtcaaagtcatggaaactgctctccgattgcagaatacaactactggtgtgacccacatgcagctgaaattgtataccgtgcctttgaagagatccctgttttacaggaaaaacaaattcatatggtgggactggacgtgacaagaaagattgtcctgactcccaatctattagagtatatgtgctgcgtaaatccgaaaatgggagatcgcattcgaaagatcacccggttctattttgagtttcactggaaacaagaaggacttatcggttgtgtgatcaacgatccactggcggtcgcttactttatagaccgtactctttgcagtggaatcagtacatgtacaaaaattgcagttgaaggactgtgcagaggacaaagcgtagttgacagatttgatttctggaacggacataaaaacagttatgttcttctgcatgcctccccgcaggcttttatgcagatgttttttgaacgagtactggacgtaccggcagaagaaagtcagccaatattgaaacagatcatgaaaggagacgacgcatcatgaaaaaaattacccctgttaaactttgtatcctggcattttgtgcagttataaatctcttgggaggacaaattgcacttttgcttcgtcttccaatctatctggattcctttggaaccgcattggcagcagccttacttggtccagtatatgggatgattcccggaatcatcagtaatctgatcggaggaatgacaaccgatctgtatgcactgtactatcttccggttcagataatcacaggctggatgtctggtattgtatttcgaaaagtaccgccgcgtaatggaagagatctgatacggattttgtttggcgctggaatgatcagtattcctggaacattggtaagctcttctattacatcaattatattcggtggaatcacttcttccggctctacaatcctggtacaactgctccaccatctcggactgggtctgactgccagtgtctgtatcgtgcagggattgacggattacgcagaccggacggtcgttctgatgcttacgtcggtattgctgatgatgctcccctcttcagtcaaagcaatggtaaataaggaggatcgttatggaaagatataataaaatcacccataaaaatccccgggaaatcgtgcttttaagagcccggccctgtgcatggggaaaatgtcgtttttgtgattatattgaggataattccagagatatggaagcaatgaatgctttgaatcgggaggttctttcacacgttaccggtgagcttggcgtactggaagtgatcaattcgggaagttgttttgaacttcccgatgaaactctgcaaatgatccgggagatcatccggacaaagaagattcatcgtctgtttttcgaagctcactggatgtatcggaagcatctgcaaaaaatgcgggattatatgggaattccaattacctttaaaatcggggtagaaacatttaacagaccctttcgggaggaatatttgaataaacacgcagattttaactccccggaagaagtgcgacaatattttgactctccttgtctgatggtggggatcaaaggccagacaaaagaaatgatcgattatgatatacagatgctaaaaaaatattttgcgcttggtacaatcaatgtatttacaaataacagtaccgatgtgaaaagagatccgaaactggttgactggtttcttgaaaaatatacggatcttctcgaagatccaaatatagaaattctgtatgaaaaaacagactttggtgtgggagattgatgctcctctccaccgaagtctgttttcttttccttccgtggtcataactttgtaaaactccacaaattttcaatttgaggctctaatgtagcataatcccaggtatgactgcttttttcttcactgtttgggtcatgcacctgaatcttgccctccacaacttttgtgagaacaataaaatgtccgtcagttgtaaaatccccctgtttcatactgcagatgatgggatgtcctgcatttagttcttccacaatagaattttcagacagcatggtctccgttcccatgactccaaaattcgctgctacttctgtcatcaggctccaactgcttccggagccttccacatagtatccattggcatctgcatagactgcaatcttgtaaggagtgatactgtcatctccagtcagtccggctgccaccatggcaagtgctgttggaccgcatccactatttgccatgatcccgtctccatagtgaagatatccccaaccttcatcccattggatcagaagtggaatttctccttctttgatctttccgacagactgtgccgccggatcgtctctcttttctaaatagtctgccacaaaatctgtggtttctgtattttttgccaaaagctccagcatacttaccggataatggcgggaatcttccagtatcttttgtacctttttattttcctttgcacgatctgacagtatctgttgaaactcttctgataaagttccatcgctgcatacaaaatcatactccggaatttgtgtttcttctgtttctgttgaatctttctgttcttcttgaatctttgacgccagatctttctttgcctcttctttggattgaaattttcctgcgatccaacgcccggcaagtgccagcaaaatgatcagaacaattacacaaagtgtacgttccacaaaaaccactttttttctgtcaaatcttcttctttttctttggtatgccataaatttaacctccggtaacagaataccacattcttacaatgctttccatacctgaataagttcttctttcatttcttttggtgtgaggtttttttctatctgatttgaaatgttgctgctgtttacttttgccacctcgatgttcccataatccatccatacaaaacaaataaaacaaagaatggagagaccaagacgaaataaaaaagaatgatcttccatcgaatcttcttctacatcagaagaaataaaattgcgatatctgggagagatcacagaactgcttctgccggtttcgtgatagagtctgcgtgtttgtttcaatagttctcttctgcgtgcttctgaatcattcatatcgatttcctcctgtaaaaaagacatatgacgagcttcctaccccatcatatgtctttttttcaagaactagaactttatctgtctgccagttcttttacaatatcttcccatgtgactcctcgttccaccataagtaccatggcatgatacaggaaatccgaaatctcatacttgatttcctccggatttggattttttgctgcaatcacgatctcggttgcctcttctccgacttttttcaaaatcttatcgattcctttatcaaacagataattggtataagagccttctttcggatgctgttttctgtcctcgattgttgcatacacggattcaaatacctgaagtgggtttttagaatcgcattcatttccaacaatcggacggtaaaagcaggtatggtttcctgtatgacaggcagcacctatctgttctacctgcgccaacaacgtatcattgtcgcagtcgatcgacagcgcttttacatactgataatgcccggaagtttctccctttacccaacgacactgtctgctgcggctgtaataggtcattttcccggatttgagggtatgatcaaatgcttcctcattcatataagccatcataagaacttcttttgttttatagtcctgcacgatcacaggaagcagtccgtctgaatttaatgtaaaatcagaaaaattcatggtactctccaatgaggtcatctggattccttgcgaaacacactcatttttaaatgcgtcaatatccagggacggttcactaatcagcatgccagaaactcctttgacccctttgcattttagaatttttaaaatttcctgctgctccatggtatctgttagaacaacgcatggaatctctgtgatattcattacagaaagcagatccagacgatgcataaacaaaatttcagaactaaatttttcaatcagatgctgctgtttgaataatgcatcaaaatcatttaatgataccgcaatccgttctttaccaaatcgtttggatacttcttcgatcaattcaaatgacagtggtttggaaaaattcagaattgcccgttttgcacctgtatacaaaattttcttcacatcttcctgtctgcgtatgtttccgcctgcaatcattggaatgctgatggcacggtttacttttttcataatatcgattgcttcatcatgcccctcatccgtattggagagatcaaatacaatcagttcatccgcacccttatcacaatattggtttgccagttcgatcacatcttctgcgacaatcgatttatcgtcaaaccattttattgcttttcctttgtaaataaaaatacagggaatcaatcttttataactcatagttttgttctcctttataagctgccttttgtagaccagaccccacgcattctgggttcttccatggttgccatatccaatgcctttccaaatgccttgaataaggcttctgccatatgatggttattgatgccatctacaatcttcaaatgcagattcattgctgcgctgtacgaaactgcataaaagaattcccggatcatctcggtatccaatgtccccagtttttcagtggtaaattctgcatgatagttcaaatatgggcgaccggaaagatccacggcgcacatcgcaagtgtctcatccataggaagaagaaaacttccatatcgcctgatgccttttttttcacccaaagcggctgcgattgcctgtcccagcacgattcctgtatcttcaatcgtatggtgggaatcaacctccagatctccttttacctgaacctccaaatcaaacagaccatgtcttgcaaatccattcaacatatgatcaaaaaatggaattccggttgagatttcagtttttccagttccatccagattgatcgtcagagtaatttctgtttcttttgtttttcgttccattactgccttgcgctgttccattatttaatccctcttttcaaaacggacatgaatagaattggcatgtgccgtcagttgttctgcttttgcgaattgttcaatatcttcatgtacggcttccagcgcctcttttgagtatgaaatgatgctggattttttcaaaaagtcatccacggacagcggagaaaagaattttgcagttccatttgtcggaagcacatggttagggcctgcaaaataatctcccaaaggctcactgctgtattctccaataaaaatcgcacctgcatttcgaatcttcgtcatcactgtaaacgcatctttcgtgacaatctccagatgttcggatgcgatctcatttgccgcatcaatcgcatcgtccaatgtctctgcgatcaaaatatgtccataattgtccagagacttctggatgatctcacttctggaaagttcctttacaaaattttctacttcttttgatacatcttctgccagttgttcactggttgttacgaggatcgcagaagccagttcatcgtgttcggcctgtgataataaatctgcagcaacatatcgtggattggctgtttcatctgcaagaaccagaatttcacttggtcctgcaatggaatcaatacttacatgaccatacactgctttcttagccagtgcgacatagatattgccaggtcctacgatcttatccacttttggaatactctccgttccataggcaagtgctgcaattgcctgtgctccacctactttataaactgtatctactcctgcttcttttgctgcaaccagtgttgcggggtttactttgccatcttttccaggaggcgtgaccataatgatctcttctacattggctacttttgccggaacaatattcatcagaaccgaagatggataaacggcctttccaccaggtacatatacccctactttttgaagcggtgttactttttgtcccagaatcgtaccatccggtttgctgtcaaaccagctgtactgcatttgttttgcatgataagattcaatattttttaaagattttcgaatgacactcacatgagaaggatctacgagagcatatgcctcctggatctccgcatctgttacctgtatattctccggcccgagtattaccccgtcaaatttttctgtataggcaaagactgcttcatctcttttttcttttacttcatcaaggattgcccgaacacttgcttcatattgtccgtaactgttgggacttcttttgagcaggtcttctaaaagattttttctggttgtttcatctaatcgttcaattctcatgccatttctccttccaaaagatttcggatttttccgatcagttcccggatccgatcattttccattcgcatactgaccggattgacgatcatgcgcgcagaaagtggacaaacttcttctaaaaccgtcagcccattttcttttaatgtagatcctgtctcaacgatgtccacgatcacttcggaaagtccgacaatcggagccagttcgatagaaccattcatttttatgatctcgactgtttgatgttttttattataaaagtaatcttttgcaattttcggatacttggtcgctacacgaatgacttcccggtgttccaacagttcttttgcatcttgtggaccgcatacacacattctgcaggaaccaaatccaagatccagtacctcatgtacattgcgtccttcttctacaatcgtatctttgccgacaacacctatatctgctgcaccgtattctacataagtcggaacatccggtccttttgcgaggaaaaactttaattttaattcttcgttgacgaacacaagtttcctggagcccttttctttcatctcttcacaggtaattccaagtttctccagcatctccagtgttttatttgccaaacgccctttggtcagggcaaaggttaagtatttcatcggttctccctcgctttcgctttttttctggcatctaccttcttttcttctcctgtagagagatttaccatgtcaattgtcagattctcattcagatacaacatactgactgcatgggttctttttccataagagatgaacgattctttcaaatctccgtcggttcgctttaaaagttctatatatttccctttttcgcgaaaatcttttgccagtgcaatcgcccatttttctgtagcatctgtatatacgatcagattattatgtcctgtttccacagagattttctgtcgggaaagagcattcatcaattcatccacgatgattgcaaatccgatagaaggggtctgttttccaaatttttcaagaagatggtcatagcgtccgcctgtgacgatggcatctcctgttccataagtataagcacggaaaacaacgcctgtataatacccgtaatggccgctcatactcagatcaaaggttacataatcgtctgccccgtacagagcgagcagtttgtaaattttcaagagtcgtcccactgcctgttttgctttgtctgtcggtgcatgctcgactgcttttttcagaacatctacatccccggcgaattccggaagcaaccggaacgttttctttaattccgatgaggcatctgcctgttccaggagctcttccactccaaaaaaattacggtttgcgatcagattgtaaatttcctcctgctgttctttggaaagtccggttgcttccataagactctgcagaaaatccacatgtccgatatttacctgaaattctttcaatcctacttttttcagcccatctactaccattgcgatcaactcggcatctgcttctacagaatcaatcccaatcagttctgcaccaagctgtgtgctttctttcaagcggccctgatagctgctgtggttgataaatgtgcttccaatataacaaagcctgatcggaaaatcctctgtttcaaacaaagttgccgctgccctcgcgatcgaaggtgtaatatccggccgaagtgccagtgtatcaccctcccggtcaaaaaacttatataattctctggaagagatcgttccgatttccttgcgaaacacatcaaaatattcaaaagtcggagtctgaatatcctgatatccgtaaagatgcagtacctgatgaagtttatcctgcactgccagctttgctctgcattcattactgtaaatatctcgaactccttcgggagtatgtaacttttgttccataaatcataacaccctttcactttactatgctaatacattaaattattctgtaattatacgaactttcgtttcttctgtcaatccctgtcatccaaatctttttgaatataatccagatacggaacaaaacagtgattttttaaagtcataaaatattccggggaaagctcttcgaaacgaatacttttacggccaccggattgagcccgattccaaaatttcaaaagttccgaatatcgcatataatataaaatttctttttggctgtaatataggatcaaaaaagaaattccctgttgtttttcgtattttttcataaaagagacctgatgctcatggacattttgaaggggaaatgtatctgccgcacattcttttgcgtcaaagcaaatcggaattccctgaactgcaccgatgtaatctacggtactgatcttgtcaaaataagcaagcgtaatatgacggcgctctttatcgatccgaacaggtgtgatcggcgttggtattttttgaatgagcgcaaggcccatttcctcatagcgggtattggtataattgatcatatcttccaaagtggatcctcgaagcccccttgaattccatgttcccattatagtacccctttctcttttgcaatccggcaaaatagttctggaagcggtgcctgaaactctttttcagatacactggataaagcctttgtacataccggaaactgaagtctggccgcatgaagcagctgaaactgcagctgatatttttgctcatattcacgattgatgtttggaagtccatatttgtgatcgccaagcagtggatgtccgatggaagccagatgcgcacggatctgatgtgtttttccggtgatcagatgtacctgcaaaagagtgacgtcattgtggcattttaaaggaagatattctgtaatgatccgtacgcttcccggaacttcttcagaacatacctcaaccttgttggtacgctcattttttataagccatccttctactctgcttgatctttcaatcctgcctgcggtcagacagagataatattttccaatggtgcggtcatggaacatctgactgagtgactgcagaccaatcatactttttccggctgccacaattccgcttgtattccgatccagacggttgcaaacagaaggtcggaacgttcgaagatcctcttgcgtcaatgcgtgagtctgaatcagataagaaatcagatgttccactaaagatgcatctgttttgtccgctttctgagaaagcatccccaccggcttattgatcaaaataatatcctcgtcttcatagataatatctagatcaacgttggtatatccggaaaatacttccgaaaatttttggatcgtttcatccgataaaaacaattttacacaatccccttttacaagcttttcatttccggaagcttttttcccattcagagtgatattctttttccggagcattttgtataaaaaacttttcggagccttgtttaaatatttgccgagcagtttgtcaactctctgtccggcttcttgttctgtaattttaatttcctgcatgtttgatacctctgttacatggaaagattcagcagaagctgtcgggtcttcgcttcctcatctccctgcatttttgcgttttctacgatagcgatggattccagtccttcgattctggagagaaagactttgtagtcatgataaaattttacggaagaataagaaagacgattttgtgtcatcatatctcttacgtgtttggcaagaatgtttaaatccacttttttactttccacatatccaaatacggttccgttggaaatcaccacacattctaccggcataattttttcacgggttgtcaaaacaagatcatatactcttgttgtatgaggcgctgtctgatttacttccgataccagtttcggattcacagaagcataggggaatcgggtgatcactcccacgagagcctttgctgccggaagacagccgagaattgctacgactgtcaaaagattactccttgttttcgtctgtacatatccaagtgtaaacaccgcagctacgagcagaaaataaatcaccgtgcggatgatctctacttttttcttgtaatccagataacctggcgttcctttttcgattcgcttcatttgtttttctctcctatttttttccaatcatctgtatctttacaatccaactgaccgggatcaccttgaccagcaggtgtattgcacgcatagaaaatccaaaaatggacactgctcttttgcgttttgcatctttaagtgcccgttttactaccctgggagcttttgccattgtaatttttttcagtgggtttgaaagctgcccgcatcgttcaaaaaattctgtatccaccggtcctggacatactgccgttacatagattcccctttttttccactctgcagcaagtgccctcgaaaaactgagaacataagacttcgtagcagcataaactgcaaatcctggctgtggggaaaatgcggctgcagatgcgatctgcagaacacgactgccttttgaaagatagggagcacacaaaaccgtcatatttgtcagtgcttcacaattgaggcgcaccatctcaccctgctctttttctcctttttgtgcaatttccaaaaccatcccactctttccaaagccagctgcattgactaacatccgaatatccggatgaaaattttttaacgcatcctggaatgtctgaagaaactcgcagtctgtcagatctcctgcaaaaacacgaacaggtaacgggactgtctctgcaagtttttccaatcgctcttttttgcgcgcaatgatccacagctcatccaatgctatgaaatgtgggatctgacggacaaattcacgtcccataccagaggatgcaccggtaatgactgcaattttcatctcatgcgcctcttttctgtcttctttttctgtatatttcgaatggtttttttcttttgttttgatcgttctgctttcgcaggctgttcttttttcagtctgcgcggacggatcaggcagtgtttatcaaagccgatcagatccattcttcctgctcttttcaacgcttctgcaaccagatcataattctctggattccgatactggatcagcgctctttgcagtgccttttcatgtggattctttggaacataaacatgcttcatcgtacgcggatccacacctgtgtaatacatgcaggtagaaattgtagaaggggtcggatagaaatcctgtacctgttccggcatatatccaagatcacgacaatactctgccagttctaccgcctcttttagtgtagaacctggatgagaagacatcagatacggaaccagatactgatcttttcccagtttctgattcattgcataaaactttctggtaaaggcttcatacacgttattggcaggcttgcccatcatagaaagaaccggatctgaaacatgttccggagcaacttttagctgtccactgacatgatactcacacaattctcttaaaaatgtatcgtcagcatctgccagaaggtaatcaaaacgaatgccggaacggataaaaacttttttcactttcggaacttttctcaattttcgcagcagtgctacatagtctttgtgatccgcattcagattcctgcatggtgttggaaacaaacactgttttgttttacacaccccttttgtcagttgtttttcacaggacggatgtctgaaattggccgttggacctccaacatcatggatatatcccttaaattccggatcctgtgtaatttcttttgcttcctgtatcagcgattcatgacttcttgtctgtacgatccttccctgatgaaatgtcagtgcacaaaaactgcatcctccaaaacatccacgattgctgatcaggctgaacttaatttctgccgttgccggaactccgcccaatttttcataatccggatgcgcacagcgtgtaaatggaagggcataaacatcgtccatctccatctgtgtcagtggctttgcaggaggattctgtacaacatacaaatgctccgaatatggttccaccagacgctttcctgaaaatggatccgtgttacaatactgggtataaaaacttctggcataagaaagtctgtccgcctttaactcttcaaaagacggcaacataatcgcatcatagacagcatccagcgattttgtcttaactgttgtcccatcgatataggtaatatcagaaactgcgatccccgcatccagcgcttccgcaatttctacgatcgaatgctctcccattccataagaaatcatgtctgcacccgaatccagaaggacagagcgttttagacgatcagaccagtaatcataatgggccagtctgcggagactggcttcaattccgccgagaatgaccggcgtctgtttatacgtctgccggatcagatttccataaactactgttgcataatccggacgttttcccatgatgccgcccggggtgtatgcatctgtttttctgcgctttttggaaacggaatagtgattcaccatagaatccatattgccggcagacaccagaaaagcaagtcttggctctccgtatatcgtgatactctccttatctttccagtccggctgggaaatgatcccgatacggtatccccgggattccaaaagtcttgtgatcacagctggaccaaacgaaggatgatcaacataggcgtctcccgtaatatagacaaaatctacagaatcccatccacggtctttcatgtcctgtctgcaaattggtaaaaacctttctctcatgtatttatactccacatctttcatatgtttttgcttgaatttcatcataactgcggatataatagtccgctttttcttttttttctttttcgtcagctgcagaaaaatcatcttctaccgcacagaccgtcatccctgcattgcgtccggcttcgattccttttggaacatcttcaaatacaagacattcttccgggagcacggcaagatcttccgctactttcagataaacatccggagctggctttcctcttttgacttcacatccggtacgcacggaagaaaaatattctcggatctgaagcgcatccaaagctgcaagggccagctcttttgcattacttgtagcaattcccatcaggatctgttcccgctttaaatatttcagaaactcttttgcacccggttttaacgcaacttttgtctgatataaatgcagtgtcatatcaatccactcctgctgcacttcttccagtgtacaggaaagtgttggaaatacatccagaaaatattgtgcggtttctgtataactttttccttccaaggccttagcaaagccagacggcggagtcaggtgatattttttcaaaaaaatacggtctacttccggccagatccacatggaatctgttaatgttccatccatatcgaaaattactgcttttttcccactgagcatagtgcatccttctctttctctgttaattcccggtactctcccggcatcaaagattcatccagttgaagcggccccatacggagtcttttcagatagagcacttttttatcaactgcttcaaacatccgctttacttgatgaaactttccttcacatattgttaaaagaatctccgaagtttcccctgcctttatgatttttaatacagcaggagccgtctgttttttctcgtggatatcaacaccctctgcaaactttcgaacatccccctgggtgaccatgccctgtactttggcataatacgtcttttctacatgctttttcggagaaagcaggcgatgggcaagttcaccgtcgttggtaatcaaaagaagcccctcggtatctttgtccaaacggcctaccggaaacagatctttacgtttgcgtgaaacgatcagatcgatcacggtcttctctttttcatcttctgttgcagaaatcacacctgcaggtttatgcagcatatagtattccctgtttgtgtaaccaacagtccgcccttcaaaaagcaccaccgctgtttctgtttctatcttcatttcaggcttttttacataaactgcatctaccgatactttccctttggaaatggctcgttttacctctgttctcgtacccattcccatatctgcaagatatttgtccagtcttattttcatcttctttcatccttatgactgccagcgccatcctggcagatatttattcttcaatgtctggccggccagctttccaaatcccagaggatatccatccacacagacgagataccatcctttgtctttacgggaaacaaggtcttctacatccagagtctcaccttttaaatacttgatgactctttcatcctgtactggaaaatctaaaatctgagcatactcttcttttttcaaagacatggcaaacgcctggcttggttcaaaccgttttttcttgagttctccaagcaaaagtccggttcttaaaaaccgtacaccattcagtttcggaagtccttccggcatataatacacacgttctccatgaatatccagcctggaaggttctggtttccaggaaacatttttaaaaaattcttccagttcttccggcagctttccgcccctttttgacgctttttcttttcgggtcacagaagagccctctccctttttcaacaatgcaagataatggccttccccttccatacggtgtgggaaaatccggactgtttttgcaaggtctggatttttactttttgtcacttctggaattccctgtgcaaacccctcgtatccagccatctcacagattgtaaactctggatattcttccaacagatattctatcgtctcttcattctcagaagggtcaaaggtacaggttgaatacagcatcattccccccggccgcagcatagaagccgcctgtgtaatgatacttctctggatcttcgaaaagaactccggaccatgttcttcccacgctttgaccatctttttatcttttcgaaacattccctcgccggaacacggtgcatcgattagaatcttgtcaaaatattccgggaaatattcggtcagctttcccggctcttcgctgagaaccagcatatttccgattccaaataattcaatattttttaacagtcctttcgctctggaattgctgatatcatttgccatcagcactccttctccctgtaatttggcaccaagctctgttgccttcccccctggtgcagcacatacatccaaaacgcggtctcccggttcaatcaaaagccggtctgcaggagtcattgcacttggctcctgcagataataaagtcctgcaaaataatagggatgttttgctggctgaatccggtctccatcgtaataaaatccattggaaatccatggaaccggacgcagcggccaaggagcgatctttaagaaatcctccacagaaattttgtttgtatttacacgaagtccgtaatgacgcggctcttcataacatttcaaatagtcatcatattcttcccccaaaaggtgcttcatcttttcttcaaatatacttggtaaattcatattctatcctccacatgaacatgattataccataattcccatagtaagactacctggaatacgcacattttattttgctgttttcgatataacgaagcaccggataagggtttacactgatctcttgtcccttgttttccagatagattcccaaatggagatgcactggaaattcaccggttgttccttcttttccatatccactgtcccccatatatccaaggagatcacctgcttttaccgcatcccctattttaagagatgcataggaatccagatgggcataataaaaatatgccccggatggagctgtaactcctattcgccagccgcctttttcaagccaccctttttctgttatgataccgtctgtcatgcttacgattggatagtaaccaggtatatttcgtgctgccatcagatctgtaccttcatgtcctcgttttccgccataatttcgttcaaacatccaggaatctacataagaaatctcctgttccacatcatctgaatccttcgggacaggaaaatatttgatgtcattccagattgctctgcaaaattgcacatatggattccatcctctttgttctctccatacccggtacagcttttgaaattcagcagtggaaatttttccgggaaatctgcggtgttcaaaatctgttgccatccaataaatccccaagtcccgtcccggatcgacggattgtttgagatactcctgcatcttgtcagaaacaggctgcctgcgaaagtcctgcaaagtgatcacagacgcttggactttttgaaacctgctgacagaaattaaattcgccgtatttaagacggaaaaaaaggtcagaaaaaatattgctgcgagatacttaaaagattggcggcacatgacatacctccctgcatatgcttcggaccattctatgcagattttgcaaaaaactttccaggaataaaccgcctttatcgacatatggatgtaataacagagcaatcgggagtttttatgcgaagaaacctgactggaattggaattttaatctgtttcgcctgtatgcttctatttccccaagatgtgtttaccggggcaagcaatgggctgatactgtggttttataccattttcccaacactatttccatttttgatcgtcacaaatgttttaatgaagacagacggtatccatctgatcgcccgggtatttggtccggttttagcaaaaatcttccgggtgtctcaaaatggaagctttgcgatcattactggctttctctgtggatatcccatgggagcaaagatttctgcggatctggtttcagcccgaaaaatcactccgcaggaaggtgcctatctgctttcattctgcaataatacaagtcctgttttcatcttgaattttgttgtatggaaaacactaaaaaagaatgagctgatgtttccgactcttctcattctcattgcagtccctgttttgatcagttttttcacaagaacaatttatttaaaaaaacaagaaattttttcgtatttcacagataaccgacaaaacaattcccttcatttcttcgggattttagaccattgtatgatggacagtttcgaaaccattgcaaaagtaggaggatatatgattctgttttccgttctgatcgaactggttggaaatattgccttttgtttccctgcaattcgcattcttctgccatttttagaagttacaaatgggatacagttgattggagcatctgcgctttcttttcctgtaaaatatgcatggatcctttttttaactgcattcggtggtctttgcgctgcagctcagacacaatgcatgatccaaaaagccggactttccatcttcccttacataacacaaaaactggctaccgctctggtaaccagtcttcttggcatcctgtatcttttatgcttctcctgagaaatcctgtccgtcttcctgaaccggagattctaactctgcacgattggtacgaacgacatcataacactcctgaagagaattgatcagtccatcatactttgtcgtataactgtctaatgtatgtccaatgatactttctgcattggcaagcagatcatctgtatactgaattgctccaatacggatttcatttgcgtccatggtcgcattgtcaatgatctcctgcgcctgtgcagttgcctgtgttacaatctcatttgcctgtgcataggcctgctgcatgatctcatgttcactgacgagttctgtcgtctgtacctgtgcttcttcgatcatcgtatctgcttttgcttttgcatctgcaaggattgcatcacggttgctgataattttctgatatcttttaatctcatccggagttttcattctgagttctcttaaaagttcgtccagatgctctttatttacaataatctttgtagaggataacggctgaaacttacactctttgtcaatgtactcttcaatctcctcaataatctgttcaatacggctgctcatagttacactctcctttttgctttcatcttcgccttcaactcttttgctaccgcttctggcacaaactgtgatacatctcccccataagcggcaatttcccgaacggttgtagagcttaagtaagaatattcaatactggtcgtcagaaacatcgtttccaaatcaggctccagtttatggtttgtctgcgacatctgcaattcatattcaaaatccgtaattgcccgaagtcctctgatgacaacaaaggcatccatctgacgggcgaaatctatcaaaagtccgtgaaatggaacaatcctgacatttgtcagatcttttgtcgcttcctctaacattttaacacgttcttctacagaaaacaacggcattttcgcattattattcaacacaccgacaaccagttcatccacaattttacaggatctgcggatgatatccagatgtccatatgtaacagggtcaaaactgcccggataaacagctcttaacatatcatttcctttccagctttctcaatgaaaacatgcttgttcgttttgtattctttttctttgatcaatgccagccccaaatcctccagataggaaaaatctgtgtgttttgatgcctctacaatgatcacggtatcttcgtaaatcaattccgaaccggacagatacgtcagtacctgcctctccagatcttgatcatacggcggatccatgaacacaaaatcgaataccttttcgccttccagctggtaaagagctgttagaacatcttttgtcatggtcatcgctttctcagaaagcttcgtatatttcaagttttctttgatacaggtcattgcctttggattcttctccacaaaaacagcctctttggcgcccctgcttaatgcttcgatgccaatgccaccgcttccggcaaacaaatccagaaaaacacttccaaaaacagacggcgcaatcatgttgaacagagtctctttgattcgatctgtcgtgggcctggtatccattccatccaacgtttttagctgcagcctttttgcagttcctgcaatcactctcatcactatgcacctccactttcttaactatgctgaattttagcagaaaaaagcactcaggtcaatcccaagtgcttttttcgttgatttcacattagaaaccaggatggtttatttaccagccatctgtttctcctgctgctcgatcattttctttaccatataaccacctacagatccattctgtttggaagttaagtccccgttgtaaccatctgacagcggtactccaagctcgcttgctacctcgtatttaaacttgtccaatgctccctttgcttctggtactgctgctcgattagatgaacgacttgccatgataatttcctcctttttgtaacttcttcttgttacctctttttgtagttttataactcaaatccccggccgcatcaacatgaaatctgctgcattctgatgcggcctctctcatgtatctgggttccgttcgtttgtgttacatccatagtatatggaggaattttatttttaaactggtaaattctgccatgattatagtgtcatctctaacatcacatctgccagataatggttcagtcgttcagacaatcgccgattgttttctgactttagtccgggatcgattcgtaaaagttctccggctgcttcagccgcctgcttcaaaatcaaagaatcctggaatacatcccccaatttaaaatccataagaccactctgccggattccaaacaagtctcccggcccccgaagtctgagatcttctcccgcaataaaaaatccgtcgttggattggttcagaatttcaagccgttcttttgtttctttagattttgagggactcataaaaatacaataggactgataagaacctctccccacccgaccgcgaagctgatgaagctgtgcgagaccaaaacgttccgcattttcaatcatcatgaccgttgcgttcggcacatcgatccccacttcgatcacagttgttgataccaggatctgaatttcattttttccaaatgcttccatgatctcatctttctgtgcttgcttcatttttccatgaaggcatcccactttgatagaattccccataatatcctgcagcatctgcgagtaatcggtcacgttttccgcctccaaagcttcactttcttctaccatcggacagatcacataacattgtcttcctgaaagaacctgcttcttcataaatgtgtacgctgtatttcgatacccggtatcaaccacacaatttttgattggaagtctgtttttgggtaattcatcaatcactgagatatccagatctccataaaggataattgccagtgttcgaggaatcggagtcgcactcatgacaagaatatgcggcaaaactccttttcctgccaaggtttcacgttgcttcaccccaaatcgatgttgttcatccgtcacaaccagcgccagattctgatactgtaccttttcctggatcaatgcgtgagtgccaattataatatccgcctcaccagattctatgcgggcatatgcatccctttttgcttttgtggtcatagaacccgtaagaagctctgtttttaaaggaatctggtattctcgaagcatcttactgatattttcatagtgctgccttgcaagcacttcagtcggcgccatcattgcactctggtatccattgaatcccgtgtacattagtgcaagcagtgcaacaattgtttttccggatcccacatctccctgaaccagtcttgacataacagaatctcccgagatatcctgtaaaatctccctccatacttttttctgtgcctttgtcaactcgtaaggaagggactgtaaaaattcatctactctgggctgctcacaaaataaataccgatttttagctcgttcttcccgctccttgatcatacgaagagaaagtacgaatatcaaaaactcttcaaatacaaagcgttttcttgcatcatagaattcttcttttgttttcggaaaatgtattctttccaatgctgttttgcgatctgacagatggtactgcctgatcagattttccggtaaaaattcctgcagtccttccacttcgcctaatgcctggaaaactgctttttttactgcattattcgtaagaccagctgtcaatgcatacaccggctgcatggtatttcttttttggtcataagaagcactgggataaaaaatctccgggtgttccatcacaagcccctcttttttacgcacgattcttcctcgtaatgtaataattccaccccgggcaagggtgttgcgaaggaagggcatacgaaaccagatgactttcagtatacccgtcacatccttcaggtagagcgttgtaatctgcatttttttattttgactgacctgaatttttccgaaaatcgctcctgtgacagttactgtcttgccttcctgaatttctccaatacacaccggctcttcatagatgtcatatgtccttggataataggcaagcaggtctccaatcgtttggacacctgcttttataaataattgttctgttttttcaccaacaccttttaaagcgctgattctttcagattctctcataaatgaaactactttctattctacagataatacataatagtaaatcggctgaccaccgcaatggaagtctacatctacatctggataaatctcttcaatctcaccagcaaagcgttctgcatcttcctccaggacgtcctgtccgtaatacaggctgatcagctctgtgtcatcgtctacaagttgggaaagcatctcttttgtcgtctcttctacagactggccaacagaaagaattccggcatctccgattcccatgatatcaccttcatggatctctttatcatcaatatgtgtatcacgtacggcatacgtaacctgcccggtctttacatttttgatttcttcgagcattgtctccatattggtgtccacatcttcctccggcatatagttgataatcgctgtaattccctgtggaactgtttttgttggaatgacaatgatatctttatcctgggtcagatctcttgcctgatttgctgccaaaacaatgtttttattgtttggcaaaataaaaatatgatctgcatgaactgcatcgatggcagtgagcatatcttccgtactcggattcatcgtctgtccgccttcgatcaggtaatctacacccaattctttgaatatatcattcatgccctctccaatggaaacagcaataaatccaactggcttgcgaggcgctttctgagcctgttctgccgcaagcttctctgcatcacgaatcagtttttcctggtgctcttcccgcatattatcaactttcatgcgcgacaactgcccatatgtcagacccttttcaaatgccagtcccggatggtttgtgtgaacatggattttcacaatgtcttcatccgctacacacacaatagaatctcctatggattccagataagctttaaattctacttcatcggattctgtaaacgctttctctgtcataatgataaattctgtgcagtatccgaatttgatgtctgcttcagcctgtgcacccgctttggtcatctttgtccctgcacttgcttcgatcgcactataatcgatctctttgccaagaaatgcgtcataagcgccatgtaatacttccaggagtccctggccgcccgagtcgactactcctgcttcttttaataccgggagcatctccggcgtctgatccaacacttctttggcatatgccagaactgccggcaaaaattcttccagatcatctgtcacttcagccatctcagctgctttctgcgcgattccctttgcaactgtcaggatcgtaccttcttttggtttcataactgctttgtaagcagttgctcttgcacgctcgcatgcctgtgcaagtacaatcgcatcaatttccttttcttcgcgaatcgtctttgtaaatcccctcaaaagctgagaaaggatgacgcccgagtttcctctggctccacgcaaagacccggaagaaatcgcttttgccagggattccatatccggtctctccatagcactgacttctttcgcagctgacatgattgtcaatgtcatattcgttcctgtatccccatccggtacagggaatacattcagttcattaatgaattctttttttgcctccagatttgccgctcctgccagaaacatttttgcgagcagctctgcattgatcgtttttgttgccacagcaaatatcctccttaatctatcactctgacaccttccacgaagatgttgatcttatctacggtcatcccggtgaattcttccactttatatttgacattgtgcatcaaattatcagaaacagaaagaatatttactccatatgcaacaatcacatggaaatccagaaccaggatattgtcatcggaaatatccacatgaattccatgtgtcagactttctcttttcaacagccgtacaagtccatctttcatgttcacagcggccatacctacaattccaaaacattctacagcgacagagcctgcgtatttagcgataacttccgggctaattgtgataatcccaagctctgtactcatactacctttcatcatatattacctccaattcttaatggattttcgcacaattaacattcgtattatactcttattatccggattttacaatatcgattcataaagtgctgtcaaaacattcaaaatctcgtcttctgacatggtggagctgtccagacataaatcgtactgagacatatcttcccaccgtttgtctgtgtaataattgtagtaaaattttctctgtttatcgacctttttgatcaatgaaacagcctctttttcttccagcgaattccgttccatcactgtctggattcttcgttccaggggcgcatggatgaaaacacttctggaggtcgggcgggctcttaaaatatcatttgcacacctgcctacaataatacagtcctccgtatctgccaaacgggtgatgatctgtgcctgtgtgtagaacagtacatcattcattggctcaaaatgaaatcgactttccatctgcgtcggatcttccactggataacgccatggatttgctcttttttcatctaccttcaccagctcatcatatgaaatatcattttgttcgctggccagcttgatcaattctttgtcatagtaatgaattccgagtctttcggataacttctttgcaattctgcgtccattgctgccatactgtcttccaattgtaatgatacgtctgctcataatcattccccgctttctgcctgttgtcaaggcgtttgaagttatttgaagttattataattttaccatgaaatgaaatcgatgtgaaccaaaaacccaatagaattcgcgaaaagtccgaacaaattggactcctaaaaaagaatttcaaaaaaaggcttgcattcaattagtgtttctgctagaataacagtgttgtgagtctgtataagactatttcaaatcgttaggaggtgcaatgatggctaaatgtgctatttgtgaaaagggtgctcacttcggaaacaatgtaagtcactctcatagaaaaacaccaaaaatgtggaaatcaaatgtgaaatccgttagagtgaaaacagaaggcggagctaagaaaatgtacgtttgtacttcttgtttaaaatcaggatgcgttgagcgtgcataatctgttatatgacgacacggaataaaagacttgatgtttacaccgtaaatattaagtctttttttcatgctttttatcattacaaaaaaacagatgccttaacagacacctgctcttcatttacaaaacagacaataccctgtcagaagtaacaacataatgattgtaattccccacggaatactggataacagaagcatgatcagcatccctactgcgatccagatcaacgcaaagccaatcacccgtttcaaaatataccacatccaccagttatcttactgttaatatatgctcattcttttgaaatagcacgcaatttatgcattttcttctttttctgcagaatccagaatttctgccacatcttcttctgttactttctcttcctttttttcggtaaaacgatccacaagatccggtaccatatccaaaatcttagtcatcgtatcctgattccttacattgacaagctttgttgttccgtttttgatcacaaggaccgcacttggtgtaatcttacctccaatgccccccatgcccttctctcgtttttctgcacggaaagaaccggcgccaaccccaaaagaaacatcaaccagaggaagaagaatcgtatcacctacatggattgcatcaccgacaacggtttttgatgaaatcaccccatccattccttgaaataatgcctcaacggttgatttaaaattattgttctctgccatttttgttttcctcctttggctacttggtatgttctaaaagcgtaattttctgatatgagagattgttgtccgaatgtttttattccacaaaagattccataagacaatgagaaaatacaatgcgtgtattctccccttgatccatgcattccctttcaatatcctctcatcaaaatttggagtaatatctatacattccccgacaaacggataaaccaggcttgctcctgccaaaacgcagcctgtaacagacgggtctgaaaaaccaaattccacattcgcctcacactgcgtcggctttaaaaatcgaatcaaacgacgtatctctatcaaacctttcgaaaaggcagccctgtgcgtttcatttgtaagaaaattcatcaccacatcttttttctttgccagtgatttgagcatatcacaaattttataaaaagtacacttgatctgctgtattttttcctggatccagtctcccggtttttgctttgtctctggatttttttttcgatttttcttctcgtatgcatcggtactcttttccggtattgcttcctgtttttctgtttcttttttctgcacagttttgtagaaagaatctgcctcagatgttttttttgactgacacaccggttcttctgtcggctgtgattcaggcgatgatcctttttccagttgatcggaagacagctgtttccacgcaagccgcatcttccactggaaatccccattccgataacacacttctccttttataagagaacatagccaggagaatctcaaagaagcagaaagcttttccaattcaccctctcccaacagagtcccctgatatctgactggcacgatgagaaagatgctggtcaatagaatcagtattcccaatattcccagtattatccagcctatgatcttgaaaatcaacaagagtatctgtatcatatgccccgcacactaccttcctcagattgtttctggttatttaagataaactccctcagcctgacatcttttgtattctggtatacatcctgtacaatttgttccgtaagctccactgcccctgcatatccatctgcgatccccaccacaaatagcggagtctcttcaaagatatgctgtttcagtaataatacagaaaaaaattccaacggattttgtttgccctgtgccagtacgatcagataaagatctggacgaaaccgttttttcttcaaatcttctacaagctttttttcacgctttttgagcgaaggactcacgtacaattctctataaaactccatattcatgcagtttccatcccctttaattccgttctttccttattgataataataagaatccagtacttgtttggctatcggaactgcttttgcccctgcatttccatcataaccttcaatgatcacactaatcaccagttccggattctctacatttgtaaatcccacaaaccaggaatgtgttttttctccatccgtcatactatattctgcagttccagtctttcccgcagccgaataagactgacctgcaagcatagttgccgttccctcttccacaacggcacgcatatattctttgagctgcgatgcctcttctgatgtcatcagctttttgtaacttttgggaacatttttgcgtatttctgttcctttatagtttgttaccttatcaaccagatatggctccatcagcgttccaccatttgcaacagcctgtgtgatcaatgccatatgatatggactgaccagcgtatttccttgtcccattgcagtcatcatcatttctccatcactggtattttcatctactacaaatgagcttttggaatagtccagtacagacggcagctttttattaaacaaaagttcttccgctgttgtccgatacgcagtccgatccagcatcagtccgatattggcaaacgaagagttgcaggaattggcaaatgaactccgaagatcctccagaccatgtactgtactgtcaaaacaccggatcgtaagatccgcataattgatcgcaccttcacaattatagctgtagttcggatagtctgtgtgctccctcatatattccagtgcagtaatgatcttaaacgtagatcccggtgcatacgctccctgggtagcacggtttaaaagtggactatacgtgctatccgcattcaaagcctcccagtcctgtgcaattgtattcggatcataggaaggtcctgacaccattgcaagtattttcccggtacttgcttccatgaccataattgcaccacggttcgctcccaacgcattgtatgctgcctgttgaagccctgcatccaatgttgtaatgacagtatccccatgatttttttcatctttaaattcgttgagaaatttttcaacaaaaaatgcattggatgttaaaagctctgagttttctacagattccagaccactcttcccggcagtttcattgctgtaaccgacaacatgtgcaaatgctgccccatatgggtataccctgttttctgttccatcttctccgacttgtgtctcggcaagaacctcaccatttcgatcggtaatgcttccacgaataatacggtcagcaaatgcatcctgtcttacattatatggactgttgacaactgtctttgcccgaaacacattaaaataaacgatataggaaatcaaagcaagaaacagtgccacaaacaaatatgtcattttagcgaactctttgtttcggaacttcttcgaagcctggttcttttgttgtcgttttcttttttgtagttcttcttctcttcgtcccatttcttaactctctttctctctttctttccagattttcctcctcatcttctcttagaatatacaatccctgtatgattccgaacatgaccatcgtacttaaaatggagcttcctccataactgacaagtggaagtgtcacccctgtagaaggaataaattttgttactccgccgatgtttaagaatacctgaaaaatataacaagttccaagtcccaatgcgaccagtttataaaactggttgtgaagagccagagcgatgttcaaaaacatgacatagcagctcacacataccaggatcagacacagagaaaagatcaatcccatctcttcagaaattgccgaaaaaatgaaatctgtctcggctaccggtatctcatccggaagcccctgaaataaccccattccaaaccagcttccagttccaattgcaaataaagactgtgcaacctgatatcctccgtcattgtatgtggcgaatgggtctttccatgccgccacacgcacttgaatatgagcaaacaaatggtatgccagcaccgctgcggcagaacctccgccaaccccggccactacataaagcggctgatgtgttgctgtatatagcatgaccaaatatactacaaataaaatcagagccgaaccaagatcggttgaaagtaccaaaatcagtacatgtgcagctgccaatgctgtcgtgatcacaatatttttaaattccagcgaccggtttaaattggctgctacaaataatacaaataaaatttttacaaattcagacggctggattccaaatccggcaatcgtaaatccaagttttgccccaccggaaacttctgccagaactgcaacaaggagcagtgcaacaagtccgattcctgcataaatgtatgcccaatcctgtaaacagttcaatttgcggatcacaaccggcacgatcagaccgatcaccacaccgactcctgcaaaaatcagctgcttgactgcattttcttcattcagtctggtcagcatgatcattccaatacacagaagcatacacatgttatttacaatcagtttggacactttcggatacaaaatccgatacaacaaaataacggccaacagaaatcctgcgctgactgcataaagtgtcagaatttcaggatcgtctttttttaaatacatgaccacataagcggtcagctgaatcaaaaacatcagcacgttttgccggatgaggatccatttttgttcgctctcataattatgtgcaaaaatagaaaaacacgaaaacgtgtaaattcccattaaaaggatcataagatattttgataattctacaatgatgttaaccacaatctcacctgcttttatgttattccgcgtctgaaatgaccgcgtgtaaaatcttctccagaaaatttctgtcccgcatctgcagtgcataccgcataggctgcgtccagaataccggtcacttcacatcttgtctctgttgaaaattgaatacggatactctttggatgcatttttatccaagcatctctttcgtcaaacaaagataacggagaggaattataaacgatattataacaaaatccacagtgatttttaaccgggaatcgttttcctctgcgatccgtcaacattgtgatcaccggatcatgtgtacagccttttgttgtttttacgatacactgggcagacgtcataactggaattcttccataaatcaccagttcacctttttccagacctaacatactaagctcatctgcattgagttccattggagctgtaaacaattctacaccgttgctgttccagaatttacggctgtaacggttgaatacatacagattatgatccagaataatggtcctgtcaaatcgatgttcttttaaaaactgaaagctctcgctgtttcgaatcagtacaccatcctgtgcaatttttaagaacaactcgtaattctgttcaaatttttcagctgcatctgcccgaaaaatgtgtggcattgccagaaaaactgctgtgccgtgtgctgctgctttttgacagagcggtatcagtctcggatcatcaaataaatccgggacgatattgctgtcaatgtagattctttcaatctcttcatactccaacacaccctctaattgttcaagagattctgttaaaacactgatcttaggatactcgttcctcatctcttcagcttctgatttgaaaagaggctccgcagtcaatcttcgtcgaaatctcccgcagatctcggattccagtttctccaatgcctggcgtctcagttcattgagctgctgcatcggaaggaaaacgttgcctttcagatcaatctccaaatgttcaaataaaaattcagttgccccggttttacaaagctgtttttcgattcttgaggcctccatcggctgtttctgtgcctcttgaacactctgttctgtataaacagtcacactgacatcgcccatccaaaccgtgagcattgctggttctcctacttccgcatgaagataaccggatatgagttctatcgtttttccttctaaatattgttcctgcatcgcagtaatcagtttttgatttcgaatgcgatttaaaatctgtcccttttgatagtgctcttttttggggacaagaatcactgtttttgttccctttgaaatttctttcccaaaagaataattctcacgctgtacattcaactccagcaaatcacctttatgaagatcggtcaaagtctctacggtcagttctcttcctttttgtgaaagaacccgaactgcaggcacacctgcatgattcggacgggaaatggcaatcatatctctgccatttcgctctttataatacccctgactgaatcctcctcgattataaagatccaacagagcttctctgtctgcctgctctacccggtaattcgtttttcctttttccagatacaaatctgcatatttacggtaaatcgatgtcacagccgctacatactccggtcgtttcatccgaccttcaatcttaaatgaatatacccctgcctcaattaagtccggaatcaaatccaatgtacagatatctttcggactaagtacatattcttttttactgctatgatcaacacgatagggaagacggcaaggctgtgcacactgtcccctgtttccgctgcggccgccgatcagactgctgagaagacattgtccagaataacagtaacacaatgccccatgtacgaaacattcgatttccatccctgtcttctggtaaatttcctgaatttcatccatggaaatctctcttgccggaactaccctggttaccccctggctctgcaaaaattgtgcagatctggcattgacagaagacatctgtgtacttgcatgaatttccaaatccggaaaatcatgacggatcaattccaacactcccatatcctgtacgatcacggcatccagaccgtgtaaataaaatggttcgatataggcatgaagggtgtcgatctcctgatccttcagaagtgtattcacagtgagatacacttttctcccgtgaagatgtgcgtaatcaatcgcctgctttaacgtctcttctgtaaaattatctgcaaatgctctggcgccaaacttaggtccgccggcatataccgcatctgctcctgcatggatcgcagccagaaagctttcataggatccagccggagacaatatctctacccgtttttttctctgttctttcagcaataaataactcctttttctgtcaatataaaagagggtcaaacaaaagctgcttgcttctgcagtctcttgagcccctcattcttttactttctgcgattcttcatctctgtttccagtttcacgatctgcatttgaagatcgttgttctcttctttcatcttggcaagttctttctccgcgttttccagcttaatctgtacggaaatcaactcatgtttcaagtcatacatttctttatcttttagctcgatatcactctccagtgagtctccctgcttctttgccttaaaataatcatccgcaatattcagtgccaaaagtacatttcttgtatctgcactctgcttgcggtatccctcgctattggcgcattctgttatcttatggttcagataggaagatactttttgcagatattcttcaccttcaaatccacttaatgtatagacttttcctccaattaaaacttctgtaaaatgttttgctgaactcatagcatcctccttggcatttcttatctgttattataaactatccgtgcataaaaaccaaccactttttgaagtttctgtccaaacacctcttacagaatctcccggcatagcatttcctaaaccgggggcagaaccccaagatgttgataggccagatcggttaccactctccccctcggagtgcgctgaataaatccacattttaaaagatacggctcgtatacgtcttccagtgttccggaatcttccgagatactggccgcaagcgtatccaatcctaccggacctccttggaacttttcaatcataacctgtaagatcatccgatctccatgatccagtccataacgatccacatccagaagatccagcgcataatttgccacttcttctgtgatcacaccatcgtatttgacctgcgcaaaatcacgtaccctctttaacagacggttggcaagccgcggagttcccctggatcgtttggcaagctccaaagctccttttgtgtcaatctctacatgaaggactctggcagaacgctgaataatcgtcatcagctcttcttctgtataaaactccaatcggtttactaccccaaaacgatccctcaacggcgccgtaagcattcctgctcttgtcgttgctcctacaagcgtaaactttggcagatccagacgaatggaacgggcggtagcgccttttccaatcataatatcgattgcatagtcttccattgcgggatacaatacttcttctacttgacggttcagccgatggatctcgtctacaaacaaaacatcgtgttcctgcagattatttaaaatagctgccatttcacctggtttttcaattgccggtccggaagttaccttaaggttcactcccatctcatttgcaataattcccgcaagtgttgtcttcccaagacctggcggaccataaaataatacatggtctaacgcctcgtctctttcttttgccgcccgtatataaacttccagcattttttttgcttttgcctgtcctatgtaatctgcaagaagctgtggccgcaaatgattttctatttttgcatcttcctccaaattttccgttgtgataattcgtcttcccatctgtttcccctactataatttacaacatttttttcagcgcttctttaagtacatcttccacagttgtataatccgtcacctggcgcactgctttcagactttccgcacttccatagcccagtgcaaccagagcctgtacagcttctgcctggatgtcattgccgcgtccatccacaggaacatcaatggatgccgtactctgcggttttaacatttcttccagattcaacttgtcttttaattcgatgatcagtttctctgctgttttttttccgattccgggagctgcacagattgcttttgcatcgccggaaagtactgcaaactttaattcatccgcagaaaggcaggacaaaatattcagtccccctttggggccgattccgcttaccccaatcaccaggcggaacacttccagatcatctcttgtgagaaatccaaataactgcagagcatcctcccgcacattcagatacgtatgaatcttaacttcacacccaagaggccccaataaactcaaggactgctccggcatataaattccataccctaccccctgcacatcaacaatcgccttatcactctccagtgccacaagttctcctctaatatatgaaatcataattttatttccttttctttattttatcactgttgcgtctttttcaaaaaaactgtcctttttaatatttcttcggataccataccgatcagcaatcctgtcacaagtccggacatgagcaaaacagggagataataccctacctggtaagtctccaccactgccatggccagtaaaagctgtccgatattgtgaaaaatcccacctgcaatactgattcctttcacgctaaatccaccgattctgcgaaatactatcatcatgataagacttaacaaacctcctgccaggctatagaaaatcgtacttagactgccgaacagaaatccggataacaggattctggtgactgacagaaagagagcttctttttctccatatatatacaaaacaataactatgaccagatttgcaagacccaacttaattcccggaatcccgaaagaaatcgggatcaaagtctcaacataactcaaaatcaatgccaaagctgtaaatacgccaaagtatgccgttctatttttcatatgtcttctcctgtatcgatatggatcgaaactgtcagttcacgatcccatccagttcactttccgcttctccgctcacactgaccaccacctggttcggaagacaaatgatgctctcccctgttcgagagattgccttctgatgtacacagagctgatccggacaatctgcccattccatttttgcatgtccatcctgaatctccagacagtttcctcctttgatcatgatctgctgatcttctgtcagaggataagtaccatacacttctccatctaccgtaacaacagcttgttgtgcgtcttttcctgtcaaccaaaaaaaacaccctgacacaactgcgagcaatacgatacatccgattaaaatgtaatctctttttttcatagcaatatcctttcagaactttatcatagcatactgtatatcggaatgcaaccgttcattcgaccatatgttcgaatttctttttacaaaaatctccggatcggaattgtgatcacacgaagtacggcataaaatacttttttcccgaaagacatctctcggggctgataattctcagcatactgatattccccgcggtctgtcatcgttctgctgtaggtcttgtcacgatcaatctcttcccgtaattcggatgcaagtgctctggaatcaatcgccaacatcagctctgtatcctgatatgtactgcgcatatccagattataggaacctacgatacaaagtctgtcatcaatgagtactgattttgtatgattggaatgtggtcccaagtattcataaacctgtacccctgtatcccagatgttttccttttgatttaaataatctgtacatccccatggatttgctccgcttgatacatcattcgtaatgatctccacatccgtcccctgttcacaagtacgttgtagatctgcatacatttcctttccacagataatatagggggtgcagatcacggccttctttcctgtacgcagcagttgattgacagaataccacatatgtggctctttattttctgctttgatcggattcgaaagaagcgtaacttttccagtttctaccgtacgtgcttcccaatcccatggttctaaaatctctggatataatgtttccaactctgtataccgcttttccagctctctctggcttttctgtacccgctctgttttctttttgcagagataatctttactttccgaaagagcccatacacgctcaaaataagatttcagctgttttaaagaagagttttcctcttcctgctgtatgtacataaaaatctctttgtctatattctgctttttcgaataatttcccaaaaacaaactggctgtatttctgccgcccaaaagatacatggaagaatctacgattacatatttatcgtgaagtcttgcctgcatcgtccagggcttcagcagattgaccggattatatatttttacctctacatgttctgtgtcggcaagtgcctgaaaataggggtcccccttcatgtccaaaaacccactgatcccgtctacaatcaaccggacatgcacatctctgtgggcagcctcgatcagtgcactcatgacatctttcccaccagtatctgcattaaaatcaaaagtagacaggataacttcttcttttgcttctcgaatcatttttaaacgatacttcaatgcatccgtattatctgtaatatatgcagcacgttctttccccggcagatctgaataacactcctgtggggcaaacgctttcttatacgaatccgatactttcttgtgctgaatataaggaatggtcaatgctcctatatataaaagaactgccatcagacaaaatcttccccaatgtatttttttctttttcgtttttagattgtactttttcacctctgtcacacctcttcgtttcttagtttccccccatagttaaaaggtagtatagtgcgctcctggtgaaaagtcaagtggagcattttattgtattttccgggaaacttcgctataataggcaaagcagataaaataaggagattttttatgagcaagattcgcccagtgaaatatatatgcattctcatgctgacgctttcatgtattttatatttgttagccggttgtacgattgcgacagaaccgcttcaaatgaacggaatgtattttgataccatcgtttccatccgtatatgggatacttcggaccgcacaattttggaaggatgcgaaacaatttgccaaaaatacgaaaacttgtttagccgaacaatcgataccagcgacgtttcccgaattaatcaggcaaacggtcagcctgtcactgtaaatccggaaactgcagatctgatccaaacagcattatattatggagacctctccgatggaaaatttgatatcaccattgctccactcagtgaactttggaattttggacacaatgaagggcagattccggaggcttctgcaattgaagaggcaaaacagcatgtgaattataaaaatgtaatcgtagatggcacaaccgttcaacttttagatgccaaggcttccatcgatcttggagcaattgcaaaaggctatattgcagaccgtttaaaagaatatctggaacagtctggaatccgacatgctctgatctctcttgggggaaacacccttgccattggagaaaaacctgacggagccccttttaagattggaattcaaaaaccatttgccgaacaaaatgaagtgctgacaagccttgatatccatgatcaatcagttgtttcttccggtacctatgagcggtatttcgaaaataacgggaaaatatatcaccatattttaaatccgttcactggctatccctatgaaacatcactgcagcaagtcacgatcatatccgatatttctgtagatggggacgctctaagtaccacttgttttgcactgggtctggaaaacgggacaaaactgattgagtccttagatgatgtgaaagcaatttttgtgacggatgacgggaagattcatcagacgagctgatctgacaactctaaaatcacggtttgtaccaaatccatcccttcaaattccgaaagctcaaaatcgtcttccggcaccattagcatgaagatttatatcataaaaactccccaaacggggagttttacatgatccattctattctgaaacttgtcttggaataataatctttcttggacatttttctgcacagacaccacaatttgtacacttgtctgcatcgatatgtgcaagaccattcaatacagtaatcgcacctgcttcacagtttctctcgcagagcttacagccaatacatcccactttacagacactcatcaacgtttttcccttgtcgtgagaactacattgtacaaatgtcttctgcttatacggaatcagctcaatcagctttttcggacaggcttctatacattttccacaggccttgcaagcttctttatctacaactgcaattccattttctacatgaatggcatcaaacggacaggcttttacacaacttccaaacccaagacatccgtaagcgcatcctttttgtccgccatcctgcatcatatttgccatagtacagtctctgatcccatagtattcgtacacatttgacgcattttcacaagttcctgcacattttacgaaggctacttttcgttcctggcttcctgcgctctgccccatgattgctccgattttttctgctacaggagcaccgccgaccggacagcctccaacttctgcttctccttttacaattgcagcggcaagtccggaacatcctgcgtatccacagccaccacaattatttcccggaagttctgccaaaacagcttcttctctttcgtccacttctactgcaaattttttgccggatactccaagaaagactccgataaacagtccggttcctccgacaatcgccgcagcgatcaaaattcctgatatcatcttttatgtcctccttaaatcaaccctgaaaatccaaaaaatgcaatggccatcaacccagccgtcaccaatacaatcggagttccctgaaaggattccggaacatcgttgtattcaattttttcacgaattcccgccatcaatacgattgcgatcaggaacccagccgctgttgcaactccattgacaacacctgtaccaatgctgtaagatttctgcacatttgtcagtgcaactccaagcactgcacagtttgttgtgatcaaaggcaggtaaacacccagcgcctgatacaacggaggcattacctttttcagaaacatttctacaaactgtaccaatgccgcaatcacaagaataaatacaattgtctgcaaatattcaaaatgcagcggtactaaaataaactggtagatcagtcccgtcacaaaagaagaaattgtaattacaaatacaaccgctcctcccataccggctgctgtctttacattttttgatactccaaggaatggacagattccaaggaactgactcagtacaacgttatttacaagtgctgaaccaactgcaatcaataataattctttcatcgtccgctcctcctactcttgtgtaccgcatcctgcacaggatgcacatccgccggcacaaccttcttttttctctgctgattttccatttgcctgcgcacggttcttcatcttattctggagtgcagtcaatcctgccagaacaaaaaatgctcctggcgccagaataaaaatagtaatcggttcatatgtatctggaagaatctggagattaaagatttttccggaaccaatcaactctctgacaattccaatggatgtcagtcctactgtaaatccaagtcccatgccaatcccatcaaacaccgacggtaatacaggattcttagatgcataactttctgctcttcccaaaataatacagtttacaacaatcaaaggaatatagagccccagtgaatcatacaaactcggaagaaatccttccagcaagaactgcacgattgttacaaaagatgccacgacaacaataaacgccggcatacgtacggaatccggaataattttacgaagcattgaaatcaacatattggacaataccaacacaaccgttgtagaaagacccataccaattccattgattgcggaagtggttactgcaagagtcggacacattccaagcatcagaacaaaagttggattttccttgatcagaccattaaacagtctctctgtacacttattcattgattgcacctcctgattcactctgcatgccaaagttattctggaaatataccaaagcggaatccacagcgttagtcacagcattcgtcgtgattgtagcgccgctgatcgcatcgatcttatcgtcacccttttctccatttttcgtatatgtaaatttctctacattcttgtctttaaactgatctttaaattcgttttcatccgctttcattccgagaccggctgtctcaccaatcgagagcatctcaactcccttgactgttccatcattcagaattccaacggacaagctcaaatctcctgcatatgcctcatgtgaagtaacagaaatcacatatcccatcacactgccatctgttccaagtgcctgtgcaacttctgtaatatctgcattatatccctcgtcctgaagaagagatgccgctgactgtacatcaagttcttcataagtctcaaaagaatccgcatcagaaagaaccttctggtaagctgcctgtttatcggcttcttttgcttttgcgataggcgctttagtcacttcatagaccaatcccaaaagacatccagccacaagtgtgattgccgtcaagatacacgtatttttcatcattttgttcattatcgttcccctccttttccaaatggccttggaagagtaattttttcaatcaacggtaccaaaaggttgctgataataatcgcatacgaaacaccctctgcagaaccgccaaacagacgaaaaattccagtcaaaagtccaaggcagattccgtatacgatctgcccggtcttcgtaatcggggaagttacataatctgttgccataaaccatgcaccaagcatcagtcctccaccacagagatgcgctgtaatatactgtgggtcaaatccatgccctccaaacagcgtaataaaaatcacaaatgtaacaatataagttcccggaattcgaagatcgatcacacccatcagaatcaggaacatcgcaccgatcataattgcaatcacagaagtttctccaatagttccccggattgttccaagcatcatatcaaaggtattgaccgcctcaccagctcttaaatttgcaagcggtgttggtccggttactccatcatatacaaaataagtcattcttccggtaaaggagatcaaaagaaaacagcgggctcctaaagccgggttcataaaattctgtccaagaccaccaaataactgcttgacaacgatgatcgcaaacacagatccaagcgctcccatccaaagcggaagtgttggtggaaggttcaaagccagcaacaggcctgtcacaagtgcactgcaatcttgaattgtcactggtttatgcatcaatttctcataaacatattctgcaagcaccgcagaaactgtggtcacaagaaccagaagccacgcattctcatgtctgaaattatatatgccaaaaaaagttgccggaagcagcgcgatcacaacaagaagcataatgttgctgcttttcactcgatcccgaatatgcggggaaggagatacattgaagtttgcactcacgtttttgtcctcactttcttactttcttttgtttgccagtgcaatctttctcatagaaccgatcgcctgttttagatttctttttgccggacagatgaaactgcaggaaccgcattccacacattccagtccattcattttcacaaacccttcttcattatggcgttccgccagatctgccagacgagacgggataattctgcttggacagacttcaacacatcgtccgcaattgatgcatgccgtttctttcgcctcagctgcctcatctttctgaaatgccaaaatggaagaagaggtctttgtcaccggtgcatccagtgttaccattgcaaaccccatcatcggacctccggaaatcagctttttaggctcttcaataaatccaccggcagcttctaccaattctctgtgattgatgccgatcggaactttaaaattccccggattctgaatatcatcaccactgactgtcaccacacgctccatcagtggttttccaaaacgcactgcctgattgattgcaatcaatgtctccacattatctacaatacaccctgcgtctgccggaagcatagccgcatgaatcgcacgtttggttgtcgcatagatcagctgacgttctgctccctgaggatattttgtttccagaattttcacacacatgcgagattttccggcaatcgcatcctgcaatttctgggcacagtcttttttattatcctctaccgcaaaaattccctgcgcattcggaaataaagataataccacttccatcccgcaaacaatttcctctgtacattccatcatgcggcggtagtcagctgtaatatacggttcacattctgccccatttgcaatgatgtactcaatcttatctacttcttttggagaaagctttacttttgtcgggaaacctgcaccacccattcccacgacacccgcttcactgatcctctcaatgatctcctctcttgtaagtttctccaaagaggcagctggctgatattctgcttcttcatatgtaccatcattttccagaacaatacagttcactctgcttccagcaggattataccgcatttcgattgctttaacagttccggatacggaagcataaaccggtgcagatacaaatcctcctgcctcagcaattttttgtccttttaaaacatggtctccctttttcaccaatggaaccgccggcgcaccgatatgctgtgaaagcggatacaccaactcacccaacggaagcaactcgacaattggctgatctttcgcaagagtctttccgtcttttggatgaattccacctttaaatgttaaaagtcccatctatttttcccttcctttcttttgtgcgatgatttttattatagcaaaaaattcactacaaaaaaagaggcgaagtcatcaaactccacctcttgatgcggctcattctactcttctgtctcttcaacagtatctggttcaagcgctttcatgctcaggctgatcttcttttctgcttcgttcaaatctaccacttttgcagtaatttcctgtccaatagaaagaacatcagatggtttttctacatgcgctcttgaaatctgagaaacgtgcagcaatgcatctacacctggtgcaagttctacaaatgcaccaaaatctgtcatacgtgcaacttttcctgtcacttcagaacctactgcaaaatcctcagctgcatgtgcccatggatttgtctctgggaattttaagcttaatgcgatctttgtatcgttgatgtctttcaccagaacttttacctgatctccaacctggaatacttttttcgggttttcaactcttccccatgacatttcagaaatatgcagaagtccatctactccaccaaggtcgataaatgcaccgaaatccgttacattttttacagttccttctacagtatctcctactttcaattttgcaaacaattctttctgcttttctgctctctctgcaacaagaagctgtcttctgtcaccgattacacggtttcttcttgggttgaactcgctgatcacgaattcaatttcctgaccttcatacttgctcagatctttttcgtaagaatcagatacaaggctggctggaataaatacacgtgcgccttctactgttgcacacagtccaccaccaagaatctgagtcactgttgcttttaacacttctttgttctcaaatgcttcgcgaagtctttcatttcctttttctgcagcgagtctcttatatgtcagtaacacctgaccttctccatcattgactttcaatacttttacagtcatagaatcaccaacagatacaactgttgtcaggtcgagagactgatcgttggagtattcgttctttgtgatgataccatctgctttgtatccgatattcaggataatttcatctggtttcacatcgattacagttccctctactacctctccgttgtgaattgttttaaatgattcttctaacatttgttcaaaagataattctgacattattttgaacctcctcaattatattattgggcgtggatgcccctgctgtaatacctactgtttccactgaccctaattgattcaaatccaaatcgccaagtgtctgtatatagtacgtatccttacatgctcccttgcatatttcaaataacttctgggtattggaactatgtttgtcaccaatcactatcatagcatccacctcttctgcaatgctcctggcttccgtctggcgttccctggttgcaccacagattgtatttaaaacacttacatcataactcttttttgaaagaatttcaactaaatcttgaaatttattgtaattaaatgtcgtttgagcaacaacacatacggcctttgccggatcaattgcaagagaagcggcatcctctttcgtttctacaacaaaaacagattctcctgcccacccctggattccctccacttccggatgctttggatttccaatgatgacgatttgttttccctgctcgctttccctgctcacgatctgatggatttttttcacaaaaggacaggttgcatctacgatccggatattttttttctccaatttttcatagatgtattttgcaaccccatgagaacggatgatcaccgttccttctgtcagattctccagctcctgttccgtgcgaagaacgaccactccctgtttctccagatcttttacaacttcttcattatgaatgatcggtccgtacgtgtaaatgggagttgcctctgcattgcgggcctgctcatataccgtctccaccgcacgttttacgccaaaacaaaaacctgctgtctttgcacgttttactttcatttcctgtcctccactgtttatttacactttgcgcagatcgcacggaccacttcttcaatactcatatctgaactgtccaccaaaaccgcatcttcagcctgtttcagaggcgctgtctcacggctcatatcccgctcgtcccgctttttgatatcttctgcgatttcatcataattacaggaaacccctttttctgtcaattctttgtaccgtctgctggctcttgtttctacactggcggtcagataaatcttcacatctgcattgggaagaatattggttccaatatctctgccgtccatgatcacatctgcttcttctgccagagttctttgaagaaccaaaagtcttgcccggacttccggaaccgctgaactgacagacgccatattgcctaccgcttcctcgcggagctttccagtgacattctctccattcaaatacacctgctgtacaccgtcttcatatccaatgctcacacttgcccgctgtgcagcttcccggattttgtccgtatcctgcggcgaaatcccttcttgtagaaaatagaccgccattgcccgatacatcgccccggtatctacatatatatatcccttttcttttgcaaccagcttggcaatggtacttttccctgctcctgccggtccgtcaattgctacattatatcccatttttgttctcctttttctttctgtgccttcactcagggaatggaaattcccgcaagatatgctgtggaccaggcaatttgaagattgaatccccctgtcagtgcatccagatccagaacttctccaacaaaatacagtccggaaatttttttagactccatcgttcccggatcgatttctttgacatgaacaccgccttttgtaataatcgcttctttataacttcgaagtccagtcagcgtcatttcaaaatgtttgatcaaatgcacaaatctctgtctctcttctcgggaaatctcattgactttcttctcttccggaatcccggaaagctccagcatgattggttttaattttgccggaaacagatgatctacggaatttttaaactgtttatttttattttcttcaaagtcccgcaacactcgtgcatccagctgttcttctgtcaaagccggtttcagatcgatcaccagacgcagttcttgttttgaaagctgttgtccgactatactgctcgcacttagcatcaacggaccactgactccataatgggtaaagagcatctctccaaaatcttcataccgttttttcttgccatcgtaaatcgatgccgtcacatttcgcagagagagtccctgcagttcttttgcataccattcccgtacttccatggggaccaatgccggatagagcttggtaacctgatgcccattttcttttgcaaatcgatagccatctcctgtagagcctgtcgccggataagagattcctccggttgcaacaatacacgcatctccggtttttctctgtccgcctttcaggacaattgcctgaaactttccatctgtttgctctactttctctacttctgtgttgaggcagatgtgtacgcccaggctgtccatttttcgcttcaatcccgcaatcacatccgaagaatggtcagaaagtggaaatacgcgattgccccgctctatttttgtccgaaccccaagtccttcaaaaaattcaatgacctgatcgtttgtaaacgtataaaaactgctgtagagaaatttgggattactgagtacagacgcaaacagcgtatccatatcccctgcatttgtaatattacagcggccttttccagtaataaataattttcttcccaggcgatcgtttttttcatacaaccacacgtcatgcccgttttctccggctgcaactgcagccatcatcccggctgcaccacctccgattatcaacactttactcattttcattttcctcgctttgttcggaagaagtttctggcagcgtatcatctacctgattcaactcatccttactgtatacctgatattctccccaaatccgctccaacgtttccaacgtatgaaccacatcctgttgttttttcatacagagtgctacgaccagtgcattgatcacactcaaaggcgccacaagagagtccacaatggaagccatgtcacttctggcgatcagattgcaggaagaatacagattcatcggtgaatgtacactgtctgttaatgtgatcactttcgccttccggttgctggcaaattccagcgcctttagcgtccgcatggaataccgcgggaaactgatgccgatgattacatcttcttcattgatccggatcagctgttcaaaaatctcactggaactgttcgtgttgactgctgtcacattttcacataccagatttaaataaaagcacaaaaaggatgccagtggtgcacagctacgtattcccactacataaatacgtttggcactgagaatcgtatcaatcgcaagttcaaatgctttctgatcaatcccggccaacgtcagttttatcttttcgatatctgactgaagcaccgtttccagaatctctgactgactgatccgcccatatgttacttccattctctgaatcgaattcagtttatttctcaccagttcttccagtgctttctgaaaaccgggatatcctttgtatccaagttgtgtggcaaaacgtacaactgtggactcactgactcctaccacctctcccaggcgcgctgctgtcagaaatacggctttatcgtaattttcggtcacataatccgcaagtcgtttttggcctttgctcatttttttatatttttcttctatgcggatcaataattcatttgtactattttcactcacacttcatttcctcttcttcctctttgttttctgtctgctattttacaggacgagtatactccttcagccatttctgctcttcttcgctcaaatgtggactgattttttcatagacgtttttatgatatgcattgagaagctttttctcttcctctgtcatacattccggagacaatgcatccaggtcaatcggcacaaacgtcagcggttcaaaatacaagaattgtccatattcattcttttctcccgcacacacgagcagttcattttcaatacggattccatgggagccttctatataaattcccggttcatctgtgatcaccattcccggttccatttcgcacatggcatcccttgttgccttccaacggaatccgatcggcgcctcatgaatattcccaagatatccaactccatgccccgttccatggttatagtttaaacctcttcgccagaatggttctctcgctgcataatccaaaaccatgccgctgcatcctgccagaaattttgcgtctgcaagacgcagcatactgcaggctaccattgtaaaatcttccttctgtttttcatcaacctctccgattgccacggtacgtgtgatatctgtggatccatcataataatttccaccggtatctgtcaaaaacagcccgccctttgtcaattctacatttgtctccggagaagaggaataatgtacaattgccgcatgttctccatatgcacagatcggatcaaaactcggccagagatatccatcctgctcttttctgaagtcctccagtttttcagacgcactcaattctgtgatggtctctttatcggcgtttttcttcagccagtacataaattttgtatgtgccacaccgtctttgatatgtcctcttcggatattttcaatctctatggcatttttcacacacttcatcagcacttctggattttctttctttacaatacgaaccgcttccggaatgttgcgatacaatgcatagttcactctctctggatccaaaaggatcgaagccccctccggaagagtttctacatcttcataaatcgcattatacggatgcagatgtacctgacactcctcaaaatgctttaagatattctcgtcaaactttctttcgtctgcgtatagttccacagaatccatggtgatcagcgcataagaaagcagaagcggaaaatactccacatcctgtccacgcacattcaacagccatccgatgtcatccagactggtcagaagatgatattctgtattttctttttccattcgttctcttacacgtttcagtttcgataccgtagattctcctgtataagtctcttccagataaaatgccggtttttcagacaaattcggcctctcttcccagatctcatcgatcagatcacagccatagtacacctgtccgtgcttctctttcgcaatcttttcatactgttctccttctgtaataccgatggtccttccatcaaacccgatattttcagattctcccagtactgattcgatatattctgcgatcgcaggtactcccggctctcccattttctgcaggcgaatgccgcttccctgaagctgctgctctgcctgtagaaaatatctcccatctgtccagagacaactttctttctctgtgatgacagccgttcctgctgagcctgtaaaacctgtgataaacgctctggatttaaaatgttctcccacatattcactctgatggtaatctgctgtcgggatcatataaacagaaatatggtgttcctccattttctgacgtaatcgttctattctatctttgatacacataaaatcgtcctcctttgccacgggtaattatatcactaaaacagattctgcacaaggaattgaatttttatttctttccgaaatcgaaaaggaccagaaaactttcgtcttccggtccttctctttgtttttattatactggatatgctccgtcttctgtatctgctacttttgcatctacttttgtctgctgagcatctctgtatttgaagaaatctgttgcaacctgtgggaacaatgcatatgtcagcacatcctcatcctgctggctgtactgtgcgcactctttgcggagtgtatccagctcgttcggaatcagatcggccgggcggcatgtaatcacttctgcatcttctccgattacttttttctgtacttccggattgaacggttttgctgttgctccatattttccagacagtacatcctttgtctcttttgttgccatcttgtagcgttctcccatcagcacgttgaatactgcctgagtaccaacaatctgagaagaaggtgtaacaagcggcggctctccaagatccttacgcacacgtggtacttcttccagaacctcatagaatttatcttctgctccctgctcttttaactgagatgtcaggttagaaagcattcctcccggtacctggtacagaagtgtcttgatattcacgccaagattcttcggattgagcagtccggactcaagtgcttcatctctgatcggtctgaagtaatcagcgatctctgcaagcagattctggtccagtcctgtatcatatggagtccccttgaatgtctctaccattacttctgttgccggctgagaagttccaagtgcaaatggtgacattgctgtatcaataatgtcagcaccagcctctacagatttcaggtatgtcatagaagcaactcctgatgtataatgtgtatgcatctcgatcggaatctcaactgcttcttttaatgctgttacaagttctgttgcctgatatgggcaaagaagacctgccatatcttttacacagatggaatttgctcccatgtcttcaattcttttggcgagatctacccaatattccagagtatatgcatcccccaatgtataggacattgcaacctgtgcatgagcattttctttgttcgccgctgtaactgctgtctgcagatttctcatatcattcatacagtcaaagatacgaataatgtcaattccgtttgcagcagatttctgaacaaagtattctactacatcgtctgcatatggacgatatcccaggatattctgtccacggaacaacatctgcagctttgtatttttgaatccatcgcggaatttacgaagtctctcccatggatcttcgtgcaggaaacgaagagacgcatcaaatgtcgctcctccccaacactctactgcatggtatccgactttatccattttttctacgattggcatcatctgctctgttgtcattcttgttgcaatcagagactgatgtgcatcacgcagaattgtttctgtaattttaattggtttttttgcaatttctgccatttttactgtcctccattattatttcacaccaaagatcgccataaatgttccggctgctactgcagtaccgataactccggcaacgtttggtcccatcgcatgcatcagcaggaagtttgtaggatctgcttctgctccgactttctgagaaacacgggctgccataggaaccgcagacacacctgcagaaccaatcagaggatttaccttgccctttgttgcccaacacatcagtttaccgaacaatacgccagctgcggtaccaaacgcaaatgcgatcagtcccagtgcaacgattttcagtgtatccatgttcaggaatgcttctgcacttgttgtagcacctacagatgtaccaagcaggataactacaatatacatcaaagcattggaagctgtttctgtcagctgtcttacaacacctgattctttgaacaggttaccaagcatcagcatacctaccagaggagctgttgtaggaagaatcgtacatactacaatcgtaacgatgattgggaacagaattctctccagtttggaaaccggtcttaactgctccatcttgatcttacgttcttcttctgttgtaagaagtttcataatcggcggctgaatgatcggcaccagtgacatatacgaatatgctgctactgcgattggcccgagaattgctgtctgctgcaattttcctgcgaggaaaatagaagtaggaccatccgcaccaccaataatagaaattgctgcagctgctttgtctgagaatcccattgccatcgctccaaggtatgcagcgaaaataccaaactgtgctgccgcacccagaaggaaactcttcgggtttgcgatcagtggtccaaagtctgtcatcgcaccgacaccaaggaatatcagagacggcaggattgaccactcatccagaacatagaaataatacaaaagtccgcctgttccgtttgctgaatcttctgcatgaagcatgatgtccggataaatgttaaccagaagcataccaaatgcaatcggaactaacagcagcggttcaaagccgtgtctaatcgccagataaaggaaaaagcatgcaactgcgatcataatcagatttccgaatgtcagattcataaacgcagtctgctctaccaggttgcccagcgtatttgaaatatattccatttgtcaaaacctcctagtttaatgtggctaatactgctcctgactctactgcgtcgcctactgccacatcaatgctagcaactgtaccatcttccggagctactacagggatttccattttcatagcttctactgtcacgatggtatctcctgtttttacagcctgtcctacacttgcgtcaatactgaatacttttcctgccgctcctgcttttacctggatgcttcctgctcctgccggtgctgctttcggagccggtgctggagctgcctttggagccgcttttggagctgcaggcgcaaccggtgctgcacctgcacctttttcttctactgttacatcatatacatttccatttacagtaattgtataatttttcattttaaaatcctcctgattaattccatttgttccatttatttgatgttcttctcttaattgaacgaactacaaatccgtctgtagaagttccttctgccgctgcgattgctgctgagatgaccgctacaagttctgtatcatctgaaacatcttccaccactggtgccgcaactggtgccggtgccggtgtttttgccggttctgtagttttatttttcttaaatttcttctcaagttccggaataaatctgaacagagaaataatgaatgaaataaagattaaaacaaggaatacagttcccattccaaggatggtattcagccccgcctttttcagaatctctgaagtagaataatgtgcattgatcgtcatactgtccattttctgttcttcatcaaatgtaaattcgatatctgccgtcttattctcatactctgcttctgtagaaacaacaataccagagcttgtcatctctgcctcgaagtccccataacttatgaactctccgcattccttttctcctgctttccaggattcaaccatagaaaggaagttttcagaatctacaggaagaccggtgttgagaagcatcagattcaactgcaagtctgacatttcctcatactgatcaaaaacttcatccggtgtctgactgaagctgctgacaattgcctctgaataagccatcatagactctctatcattacttgttgtcgtatctgcctcactgccgcatcctgaaacacctaaggtaagagcacaggcaagtacgattaaacttaattttttcttcacttcgcctcacctcactaaaccgtaccgtgtttctttgccggacgatcctctctctttgtgaacagcatctcaaatgctccgatcacatattttcttgtgtcggctgcatcaatgattgcatccacatatcctcttcttgccgcagaaaccggactggactgcagttctttgtattctgcagctttttcttttaatgtctgtgcatctgcgtttgcatacatgatctttgctgccatagaagcatccatcattccaatctcagctgttggccatgcataaaccagatccgctccgatggatttgctgttcatcgcaatgtatgcgcttccataagcttttccaacgatcacatttactttcggtacagaagcatttgcaaatgcataagtcagttttgcaactgcacgagccatatctttttctgcttccattgttgcttcaaatcctgtcacatttgtcagggataataccggaatagagaaagcatcacagaaatttatgaaatctgctgcctttttgcatccatccactgtcagaacctgtcccagtgattctgcatttccttcttcgtcatacactttggaacggttggcaaccgcaccaactgtcattccattgagacggatgaatcctgttaccatctcttttgcatattctttctttgtctcaaagaagatattgttgtcagaaattgtggcaagtgcaattcctgtgtcttctgctgcattggcaagatctgcacaaatacggttcagatcatctgtacattcctcataagatgcatcgtcttcaaagttcgcaggaagcatacagatcagggaacgaatctgtcccagaatttcttcttctgttcctgccgcatctacaagacctgctgttctgctctgatactcagcacttgctgtgtcgcatttagaatcgatatttccttccagagcatttggagaattcacaaataattttccttctttgctctccataaatgtgaaatctgtcattccaggcaccactgcaagaccgcctccgcacataccgaaaacagctgtgatctgaggaatcacaccggaagccattgcctgtttgaagtacagacttccgaacgcctccagagcgtctgtcgcttcctgaagacgaagacctgcgcagtcgatcaaaccgatcaccggtgcccccatcttcattgccatatcatagatgtttgcaattttttttgcatgcatctcgccgatcgcaccttttaaaacagatgcatcctggctgtagacatagacaagatttccgtcaattactccatagccagtgatgacaccgtcagccggagtttctttttcctgcaggttgaaatctgtatttcttgctgtaactgcaccaccgatttcaacaaagctgccctcatcaagcactgtggcaattcttctgcttgctgagttttctgttgcattgttgctcatattctagccctccatattataaaatgtgtttaaatataaaccaaaatttttgcctattctagtatatattacttagcgaaaaaattcaattgaatttctgttttttgtcatttctttgccatttccgtttattttccccatattttcataaaaaaagacatactccccattttcaaagaatatgtctttttactcttatttctgatttctgaactggaccggtgtcacttgatacatctttttaaaaatccgattgaagtgttctacattctgatacccgactgtttctgcaatgctttctaccgtcgcattgctttctttgagcatggtacaggcttttttcatccggatatttttcaagatatcaccaaatgtcataccggatttttctttgatatacttggacagatatggtttggaaaggaaaaacttttcggaaagctcatccaatgtcacatgtttatagtttgcatatatatagtttgtaatctctaacagcctcgcatctttgcaatcctgcatatttcgaagttcttctatcttattgacagcaactaccagcgcctctacagatgctttgataatatccgcatcaatccctacgccccaataccgttttttgttacagattacaccgacgtaggcaaccgccttggaagaggatcctttcgtcatggaatgctcctcgtaaaatgccagctcataatcaatatcaaaataatgtttgattgcattgctcactgcatccagacgtccatttcccattccattgatcacgtggtgagtacctgcatgatgaacagtcgcttctgcaaaaattccatcttcctgtttgaaatgacactcatcgactgtaaaaatagtttttgcatgaatataatgatcttcaaaaatatgatatacccaatctggggtcaattctttatgcgctttatccgatacatctttgacaagatagccgacttcttctctcattttctgcggcaggctgataccaaaactctgcttcaaaatatagtttactccaccttttccggactgactgttgatacggatcacatccgtctcatagcggcgtcctacatcttttggatccagcggaagatatggaactgtccatgtttggcactgtttttcttcccgccatgccattccttttgcaatggcatcctggtgggatccggaaaatgcagtaaataccagctctcctgcataaggctgccttggagaaacatgcattcttgtaagcctttcatatgtttcactgatctcactcatatgcgaaaaatccagccccggatccacaccttgagagtacatattcatagcaaccgtaataatatctacattcccggtccgttctccatttccgaataacgtgccttcgatccggtcagctcctgccagaattccaagttctgcgtcacttacaccggagcctctgtcattatgtggatgaagtgacaaaatcacatgctccctgttatataaattcttactcatatattccacctggcttgcaaacacatgtggcatggcattttccacagttgtcggcaggttgatgatcacttctcgctctttggaaggctcccatactttcaagaccgcattgcagacttccaatgcataatcgacttctgttccctgaaagctttccgggctatattcaaaagtaaagtttccttcggtttcttttgccagttcatttaaaagaaccgcgccgtctactgcaatttttttgatttcttctttctcttttttaaagacctgttctctctgtgcaacggacgtcgaattgtacaaatggatcacagcatgcggcgcaccttttactgcttcgaaagtccgtcggatgatatgctctcttgcctgtgtcagaacttgaatcgtcacatcctcaggaatcatattctgctcgatcaatgtacgcagaaactgatattctgtctcagatgctgccggaaatcccacttcaatctgtttgaatccgacatccagaagcatctggaaaaactctactttctcttccagactcataggttcgatcaatgcctgatttccatcccgcagatccacactgcaccagattggcggtttttcaatataatcttttttcacccaatcataacacggtactggcggcataaaatagcttctctcatatttttcaaaattcttcatcacaagcactccttatattagatcaactcagttgtctttttttatttcgtttatactagcacactcttcttctagatgctagtgacatttttaatcacttatattgattttttttaacatttctccattttcagaaaatattttgctgcaatttcctgccaacaccagacaaaattaatttttttcactgatttttgaatgaccacaggaagtgtaacaaccgtttttccattaatcctatattcaactgttcctgattttgttccctttttaaccggagcagacaattcagctggaatatgtttctttacctgtacggattcccaatccgccaaaaggaaggaaatatccgactgctctgccaatacttctgcatatgtacaggcatttttctgtccgaaatccggaatcccgtcacgcaccgggatcttaaatttctctccaatatcatccattctctggtacgtaaaatgttccagtccatattccatcaatttttttgtatcttcccatttataattccgattattaggccacccacatgccagaagtgccacaagaaatgttcgttctccacgccttaaagctcccacatagcaatatccggcttccccggtaaatccggtttttccggatattgcaccttccatcatcgtcaaaaacgcattgtgattgatacaggaatacgtatgtttttgttccagatctgaaaactgatgagaagacgctcccgtaatttctaaaaatgcttctttcttcggcgactccataatgcaatagcgcatgatccttgccagttcttctgccgtggtatgatgacttccaccatcatctgctccatccaggccatttggtgtcacaaaatgcgtatggctcaatcctagttccctcgctttttgattcatgatatctgcaaatgcttccacacttcccgccagatgttcggccagcatcactgccgtatcgttgtgtgattccagcatcagggagtataacagatcttccagtttgaatttctgcccttgtgttgttccaagcttcaccctcggctgagcagctgcatttgcactgactgttacactctcgtgcagctctgctctctctaacgcaaggatacaagtcataatcttggtggtacttgccatgggacgctccgtttccgcatctttggcaaataaaatacgcccactgtctgcatccattaaaactgctgactgggcgtataactgtcccggagtatcttctccatatgggattgccgactgttcttctgcatacgtatcagataccgggaacagactattgactgcaatcaaaagacagaatcccagcatccatcggaccctgtgcattcgtcttctttcttttcttttatcctgcattgttttttattctccagacatcgtttgctatatcttatgtcaggatcatctaagccagaactacagattcagccttaactgcacctcatcctccgcctcttctttgaaatgagctacctgctctggattcggagacggaagctcatccagggaatgtacgctgaacctgcgcagaaattcttctgtggttccaaacaacagcggttttcccggtgcgtccatccgccccacttcttctaccagattatattccaccagcttgctcaccgcatgatctgacttaacacctcgaatcttctcaatctccagcttcgtcaccggctgtttatatgcaataatagaaagtgtctccaaaagcacatccgtaagaacctgtttttttggctgcttcgctacccggatcagatattcgtacatttcctttttggtacacatttgaaacgaagtttccagttcgatgatccggattccacggtcctcttcttcgtaccgatccatcaattgacggatcagtttttgagtggtctcctcatcatgtccgatggcctgtgcaagtttttttagctctacagatccacccattgcaaacaaaatcgcctcgatggctgcctgtaattttttttgctccattgctacctgtttccttccgttttctttatatgatcattttccttacagcagagaatctattagaatctctccacagatttcctcctggcacacacggatcattccggttttcatcaattccagcactgccaggaatgtcacaaccacgtgcatcttgcttttttgcttttcaagaagtgtccggaagctgaacttcttatgtgtccttgcgtaagcttctacatacagcaatttgtccggaagcggcacttcttctttttcgatcttaccaaatttactcctcacaggatcgatcttttcttcctgtcggcgcatcacttccttgaatatctttcgaagctgcaccagtgtcacatccgcaagaagcgaatccagatccacagcaggtacatagcttttcacttctcccgggatatcctcttctctgtaaaaacactgatccgcgtcaatctgacgatcccgtagttcataggacatatacttgtacattttgtactgcagcagctgttctaccaactcagctctcgggtcttcctcctctccttcttcattgacttcttttggcagcagcattcgacatttgatatccaaaagtgtagctgccatcacaagaaattcactcatgacgttcaagtcctcccgctccatctgccggatatattccatatactgactggtaatttcgacaatcggaatgtcatagatatcaatcttgtttttttcaatcaaatgtaaaagcagatccaatggaccttcaaagacctgcaattttaccggtatccccatctgtgttatttctcccatcttcctgtctgttttacactgtgtttcattatacgggaaacttctcaaattctcaactgtctttttcacctcttaaacgtactatcaccatctccgcttcatttaaaaagcgaagattgaccgtatgcgttccaagccccctgcttacgataatcgtctgttttccttctgtcgtcatttctccggaatatttcgggaacagcattgcctgtggggtgatcacgcctccaatccctggaagacggatgattcctccatgaagatgaccggaaagcaccaaatctgccccccattttttatacgcatcaaaataaaccggattgtgcgccaggagaatctcgtaagcagaagacgcgtccttcttgatacatttttctacatcacactctgcaatctgatactgcttaaattttgtgtatgtaacaagtggaagctccagcccccaaattcgaatcttactctctccttcttccagtaaaatgctgtcattttccagaaactgtactccacattcctccaactgcttttgataagacctgtatacatccccatattcttctgctttttccttcatccgctgttcgtgattgccacaagcataataaaccggacagatggagggcaatttcgagacaaaatccagtgccggagcaaatgaacatcctttttttccgatcaacatatctccgccgatcagaatcagatccggcccggcttcctgaattgcatccagtagctttcggttccctgtcccatattctttattatgaaggtcacttaaaaacacaatctttttttcccgcttcagaccatttaacttgtccgatactacgatatcttctgttattgtaaaatacttctgctcccgatacacttccagcaggcaaataactgctgcgatgagcagaatagagaagcctccgatcactgcttgcatagtattctccttcttatcattttttctttttatcctatcatttttttagattccgttcaaccaaaaggaaaggtgcagcattccgctacaccctgattttttccatcacttttttcagataatccagaaactctgcttttctgcaactttcttttgccaggatttccacttttccgatttgtttttcacccagtgtatagaccatctctcctactttctgtcctttttccaccggcgcttttacagacttcttcatctgtacctttttggtcacccctgccagatttgctccgcttgtatccagataacgaaatgttcctttgtattcacaggaaatctgctccctgacaccgccctccacagaaatcgtctttaatttcggcggatcattgtctacatatacctgacattttccaaatccatagttcaacaatctggttgcatcctgaaacctctgtttggaattttctccgcccagaatcactgcgatcagttccatcccgtctttttctgctgtcgcagatacgcagaattttgcctcattggtggaaccggtctttaaccctgtggcatatggatactgccgcaccagtttgtttgtattagacagtccaaactccgaagttcctttttttgtcgtatgtgtgatcgtatccatccatatcatgcagtagtcgtggatcttcggatatgtttcaatcaattctctggacatcaaagcgatatctctcgctgtcgttaaatgcccctctacatccagtccgttacaattttgaaaggttgtatttttcatgccgagcccagccgcccgttcattcatcatctttacaaaagcctcttcactgcccgctatgtattctgccatggcagtacacgcatcatttgcacttgctacggaaatacacttcagcatggtatccacggtctgggtttctcccggctccaaaaacacttgagatcctcccatagatgccgcatattcggaagttgacacttcatcttccagcctgatcttaccactttccagcgcatcaaaaatcaaaagcatggtcatgattttcgtgacactggccggtgcacgccttgtatccgcatctttctcatacaatacgcttcccgtagacgcctccattaaaacagcacttggcgcctgcacctccacatctgaattctgaatgttctccccggtttcttctgccaaaacgtccatttgcggtacaacaaccatggagagactcagcaccgcacacagtaacattgcgagaattcgcttcatatcgattctccattccctaatctggtctgttactaactattatatccactttgacttcttataataccagaaaaatgccagggaactcaaaccccaagtcagaggatatacccagtatacaacttgaatactatgtgtcaacggaatcatcaccgaaaggaatgacacccggatcacacaccagcacatcatcataatgatcatcgataccatggtttttcctgcacccctcaaaatcgccgcaatagaatgggaaaatgcaagcagacaataaaagagcgctgctgttctggcttttccaacaccaaatgcaatgatttcaggagaggaatcaaaagctgcaatcaactgtggtgcaaaaacaaacaccacaattccaatcaattcagccagaatcacagtcacaaaaataccaaaccgtgccccttttctcgtacgctcctcctgttttgcaccgagattctgtcccacaaaggttgtcagcgccatagtaaaactgttgatgggaagaaagccaaatccttctacttttgtatatgctccatatccagccatcgccatctcaccaaacgcattgatgttagactgtacgatcacgtttgcgaatgcaataatcgagttctgtacaccggatggaagaccaatcttaataatctgcttcaaaatccctttgtcaaagcgaatctttgaaatgttcaccccataactttcttttgtccgcaacaattcccagaaacacaaaatcgcgcttaccacctgcgaaattactgttgcgacagccgcacctccaactccggtatgcatccctgtaataaatacaagatccaaaattaaattgattacagaagatacaatcaaatagtacaacgggtgtctgctgtccccgactgcttgaaggattcctaccagaatattatacatgacaaatcccaaagatcctgcaaaataaatctgaagataggtaacagattctgccattacgctctccggtgtgtccatccacatcagaatctgcggcgaaaaggccactccgactccggtcatcaaaataccggcaaccagaccaaacgctacggttgtatggactgcatgttgtaaatttttctcatctcctgctccaaaaaatcttgcaacgatcacacctgctccagatgcaatcccgctcaaaaagccaatcagcatgaaaatcagacttccagaagagctgactgctgccaatgcactgcttcccagaaaattccctacaatcagagaatctacagtattatataattgttgaaataaattacccaaaaaaatcggcatcgcaaaaaaagtcattctcttccaaatggagccgcttgtcatgggtgctattgttttcgtcataaaatccccccgttgcttttcctattactctactgtaatcgcatatttgatcacgccatctattttctcttcaagtatgtacttttataaaatcacgaataatttctccagtccaaacttctcttcctcctgcagcatctgttccatcttgcacttattgaaatccgaatgctccacctctcttgcatatcggcgtgccgcctctgtaatatcggaaaactccaatgttccgtttttaagaaacatccctttcaccagttcccggatcaaaacacttcctgccactgcaaatttcaactttccataggcctgttcatcatagactgctccgcaaaaatatgtaaatacaaaataaaccatcagctgttccattgtgttttcggtaaataccctctggaactcgttcctttgctctgccgagatttctgattcccggagaatatgtttcgtttctttgacgtagattttccagtcttctctgagcacttccaaatgattcaagatcacaaacagattgccaagaacctcttgctgtgtacttatctctgcattcaaacaatccagtttcttctgaaaccagttccagacatgttcttttgcataacgctttaagagcccatcaatctcaaacagagcgtttttatcaatcctctcctgcagatcatgggccagcgcaagcacaattgccattctcaatcggatcgggtactcccggttctgaagaatctgaaacatcaaagttctcgcatcctccagtttggtaaacaggaaaaaatcaaattcttcatacgtttcttcccggtctggattttccgctttcagaaatcgaacggactcctcacacccaaggatcagatttgctgcctctgggcaagataaggacagtgaaatctcacgaagtccttcaaattcttcgatatgtctcggatacagacgacaggtcctgcaaaacatctctgctccaccgccttcgatatacagatcacacagattctcttcgttcagaaaagcacagcgtttctggtattggcgaaacgccccctctttccagtcaatttcattgtgcaggcggctcccaagcgctccttttgtctgtctgtattttttcagagaagccggatcgatcataatctgccacccggcacaacatgtatccgggcactccccgccagtgcatgtaaattttttatagtaatgcggaatgatatactgcatgttatactcctttttatgtcatcatttctcagtccagaaacacatactgtctcaatcgctcaaacgcctcttttacacggctgtgcggaagagccaaattcatccggatatggcatggtccatggaatggacgtccatcctgccagatgacgcctacggcaattcccgctttctgcaattcatcaatcgtctgatgatgtgtctcgcaccagcctgtacagtctagaaataacatatatgttccttgaggtctggataccgaaatacccgaaaattctcttttgataaattccaaagcataggtaatatttgtctcaagcaccgtgcgaagttcatccacccactccattccttcctgtgagtatgctgcgatcagcgcatgcatggacagcacattcatagaattgtaatgcgtcatctttccttccatagacaccctgtctctcaaataggaattataaataatatgataggaaccgatcagacctgccagattaaacgtcttagacggtgcgtaaagcgcaatggttctgttttttgcatcttcagatacagactgcgtcggaatatgctggtatcccggaagtgtcaaatctgaccaaatctcatctgaaatcacatacacatcatgcttctgatagattgccattgccttttcaatctcccaacgctcccatacgcgtccggtcgggttatgcggagaacaaaaaatggctgcatgaatcttatattttacaattttttcttccatgtctttataatccatccgccagataccctcttcatccaaaatcagcggattcaaaacaatattccacccattgtcttcgatacagtgggtaaatccaatgtatgtcggggactgcagcaagacagaatccccattggaacacagcacttttaaggcagaaacaactcctccaagtactccattctcatagccaatgcactctttggtcagattgttcactccatttcgtatcttctgccagttgatgatcccatcataatatgctgccgacggatcaaaatagccgtatgccgggtgctccgctctccggataatcgcctcgggaatagctggcaaagcaggaaaattcatatctgccacccacattgggatcagatcaaacccttctcggatcttcgcacccgcaaaaaaatcatgatctgtattctttccggcaggtgcgtccactgcgatggcatcttttccccgccgatccataatcgttgtaaaatcatactgcatgttatcaaacctctttctctaaatacaatttcccgcaaaaagggaaggatgttccaaacctgggcatccttccatctgagaaaacgaaccgcatcgtttcttctattttagcaagtcaatgtgagaaaatcaacacttcctctttttttagtcgaacagactcatttgtgtatattctggctgtttcttccagttttcccatgataccgattctctttggatcaaattgtcattcactttttcgaaaaattcagattccttgtttgcagacaccagaatcaattcttcttttgctcttgtcataccgacatagagcaaacgtctctcttcttctaaatctgtggagtacgtctcactttccaaaggaatttttccctgctcaacaccacaaatcagcgtcaccggaaactccagtccttttgccccgtgcagggtcatcaatgtaacagctcctgacgaacagcctttttccccgcagcgcttcagatctccctccacgcccaactgcagcatcttcaaaaattccggcatcgtagtaaaaaatgtggtcatcctctcgaacatctgcatttcttccgcctgctccagctgcatctctttcatccattgtttgaaaaattgtgccggtttctttttttgatacaccggcaaaaaccgctctgcggttttacgcagtatttctttggcaatgtctgtctcttccagattccataaaagcttcagcgcctggcatccggcatgttcatccctctgattgtccagatattgcaaaaactgaatggttccctgtactttttcattctgaagaaagtcttcttttcctgctgccacatatgggattccctccttcttcagacagcgttccaacagccttgcctgccgatgcgtccgatacagaacagcaatttcatcaaatccgtacgctttctgttctttccatcgttcagaaactctttgtgcgtccaacatatccaatccacctgtcagccgactgatttcctgtgcgacaatctctgcctcctgaaattcactgcgtgcctgcagcaaacgaaccggcgctgcttccgttccggttttcgggtatcgatttgcatgcaatatccgttctccaccgggattttctgcgatcacagcctgtgctgcgtttaaaacaggggcgtaactgcgataattttcaatcagttggatctgctccagatctggaaaggtttgctttaatttttcaaaacatgccgcatcggaaccacggaatccatagatggactgatctgggtctccaatgacaaacagctctcttcccttctgattccaaagttggagcagcttatattgcacaggattgatatcctgaaattcatccaccatcaaataggtaaaagacctgctccaagtatcttctttcgattttaaaatatgcattgtctccaacagcagatcgtcaaaatcaaacagattctgttcctttttcagcagttcgtatgccgcatatgcccgctgccatttttcgctctcctcggaactaattacaactcctgattttttcatagaaacctgttgtaaaaaccgggctgcagaaagatccagttctccggttacctgttctgccagttcttttgcttcccgttcattcagcagagaaaacgaaactccctgtgtttttaagaagttcatgcagattgcatgaaacgtgccgatctgcatggcactcagcttctttttctttcctaatttccgttccagacgctccctcatctcagcagccgcctgattggtaaacgtcactgctgtaatctcccctggtttcactttcctctgttccagaagatatatcatatgagagaccaaagtctttgtctttcctgttcccggtccggcaaccacagctgttcgtcttgcaatcgtgcgaaccgcctgttcctgctgaatgttgaaaatttcctgtttttcttctgaaagcccggttggacgcttctcctgttcacatttttgtttttccatcgtttctgacaatccccccggaacagtctctccatctgccgcatcaacacccaaactggcaaagaaatccatctgcccatccacttcttctaattcatagggctgaaacagtttgattgttccatattctccgtcaaatcccggaatccgttctacctctccacttcgcagacgctcaatcccctctgcgatcaaaaatcctgatttttgcctaatttcttccaaaggcacagttctcagaatctcaaactccggtccaatcctctgcaacatcttctcgtattctttttgcacctttttacttccggaagaaacgcccatggatgcggcaatcacttctggaagcggaaccagactttcaaatcctttggcgccatcctttacaaatccttcgggtctatccgccagttgttcgattcgatgagaaacaccaatggtaatctttcttccacacaccggacatttccccgcacaggcttctgtttccgatggtgacagacaaagattacatttgcgatgtccgtccatatggtattttccttcttccgggaaaaattcaatggtccctgacaacccatcgcccttttgaatagcgccttttaacccctcataggacaaatcaatatccagaaggttcgcttcccttcctaattttgacggggaatgtgcatcggaattggaaatcagctgaaaccgatccagcatggacaccctccaattcatcggaggatctgaggacaggccggtttctactgcatgaatatgggaactcagatccccaaagcaatcttccactgtatcaaatccggaaaatgctccgaacatggaaaaatgtggcgtccagatgtgcgctggaacatacattcctcctggtactgtctctaacatcatttccaataagtcccggcaatccaacccaaggattggccgcccgtctgcctgcagattcccgatcacttccacctttctggaaagagcctctgctgcttccagtccaggaagaatcaaaagactgtggactttacgtaccttatcgtatttcttataaatcgaactgatctcccccgtgatcacaaatcgaggaattctgtgatccggtgtctttccgtccaaaatccgatattcttttttcaatacataaaaaccatcttctgcaggctctaatttttcttttagttcatccctccatgccggatgggtgaagtctccacttccaatcatctgaattccttttctgcgcgcccacagatccagatactccggcgtacactctttgctggttgctctggaatatttggaatgggtgtgtaaatctgcaatatacatgcctgattccctcttttctattgttattcctgactttttctctattaaaaaatataccacaatccgacaattccgtcagtaaaattgcttgcattttccatatccaggtaatataataatttggtgcagatattcttaacggcaatcatcagatttccgtccaggcagactgattttcctgccatctgctttttttatgtatatttttactctctttcttcagaagagagattctatagatcaaaggaggttcttatgaattcccgtacttattatgatattctcggtgtttcccgggatgctacattacaggagatcacaagcgccaaaaatgcgcttgctaaagtatatcacccggatgccaatatgaatcagggcatcgataccaccgcgtgtatgcaggagattctggaggcataccgggtactttccaaccccgaatcccgacatgaatatgataaagaattaggcggcggacaggttcgtgtcttccgcacgtttactgttggccctgatgatgaagaacaggccgcaccatttgttgtatattggaacgctgcctgtcgtctgcaggaaactgtagatcttgccatggaatttttggaaaacaactcccagaagaaaaagcgtacattcctgttctttcgtcggaaagatgctgcttccgaggcagaaaagcagaaacatttaaacaaactgtctgttcgcgcaatgcagtatatttctgttttaaaagaagccggcatcccgtctcaatactggaccgaagatgcgatgaactgggtattgatccggtggagccatcgccagaatatggactatcgtgtgctcttcaatcgttatgaaaaacatctgaatcaggatctctccaactctgagcgtcataaacttcacgtccgtggaaagcaatttcacaacaatctaaaaaaactgctcagctgcgctctataggcgcagcaggcagtcctgcagtaaggcttcacagccttcttttacatcttcgtatgttctgtcaaaattccctgtataccatggatctgcgatatcctgccctgcccggtctgtaaagtcaagcagtttcgacacttttccttccggatcaccgcccagaatccgcatcatatttcgaatattcatagaatccattccaatcagataatcaaattcattatattctctcttttgtaactgacgtgcccggtgatctccgcatgggatgccgacttcttttaatttccgccgtgtaccgtgatgaaccggattcccgatttcctctcggctggtagctgcggaatcaatacagaactgatcggcaagatggtgcctgttgatcaaatcctgaaacacatattgtgccatggtgctgcggcagatattgccgtggcagatgaatagtatttttatcatgttcttatatctccttaaatcgtcgtatttccttatatttaaaggctttttacaactttcatttttcttgtagtttctgtatcttcttataaattctcatgtttcggcaatcaaaagttgtaaaataagttgtaaaaccaccctcattttacaactttacaacttaacgattacagacttctttcatctctttttgaatatcgtcaaagtccaagtgcgtgtatgtattcagtgtaactcctatatcagaatgtcccataatcttctgtaatgtcttagggttcattcctgactttgccatattagaacaaaaagtatgtcgacaaacatgaggtgtgattttaggtaattcctgtttatatattttattatacttcttgcaaatatgctgaaaatatttctcccaatgcaaagcaaccataggcatgtcattcttatctaaatacaggaaaccgcttttaccgtctatcacaggttctgattttggctttttacggttttgaataatcttacgaaaacacgcctttatatcatcagtcataggcacaagtcttgtaccgctgtctgtctttgtgtcctctataatatattccatattacgcttacgttgcaactgatgattgacattgataacacctttttctaaatcaatatcagaaatcatcaatccaacaaattcagaaatacgaagtcctgtcttaaatagaatgtaaatgccctcataatacttacgaaagtgcttgtcctgctttacaaattcaagaaacgctctctcctgctttcttgtaatagcttctcttgttacgctgtcattgacaaccaccgttgcaagctgaaattcaaaagggttctttcgtatcaaatcatcatcaacagccatttgaaacgctggtcttataacaccacggatagaatgaatactgctgtatcctctaccgtctgcctgcaatttaatgagccagccttttgcgtctgatagttttaccttgtcaatccgtttctttccaaaggcttctttggcaatgatattgataacaaatttatagtttgcttctgtattatggtcctatgatgatgtctgacatgaacttaaagtcctactcagacacatcttaccacaatgaggaactaaagtcactcactcgttatcgttttgataaagtcaaagaacgggcaaagctgaaaagttctgtttcaagactgatctgtattcttttcccagaactggaaaaacttgttcctacgattcatatggcatccatttatgctttactttccgaatttccgagtgcagatgctgttgcaaacgcacaccttacaagactttccaatctgctctctgaaagttctaaaggcagatatgggaaagacacggctgtcatgtttcgcgatgctgcaagaggttctattggttctcatatgcctgccaagtctttggaactaaaacacaccatcaaactcattcaggaattaacgattgagattgacgaaattgaagcaactatcaaacgaatcatggatgaagaaatccattctcctatccttaccattcccgacatcagttaccggatgggcgcaatgatcattgctgagattggggatttctctcgttttgattccacagataagatactcgcatatgcaggaatgtctccctccacttatcaatcgggacagttgaataactgttattcccatatggagaaacgaggctccagatacctccggtatgccctttacaatgccacaaaatatgtttgccattgggatgattcttttggtgcatatcttgcaaaaaaacgctcggaaggcaagcattacaacgtagctttatcccatgccgctaagaaacttgtgcgattgatttttgcgctggaaaaatcagggcaagcataccttccaacaagttaattttttctgtaaatatctcctattagagcacctgtaaagatgctcttattgtcatgcagttttcaaagttcaaatgtatctgaaatgcatttctgcaattcattcacaaaactttcattttagacttgacttttaatagttagtctctctagttaaatggtatttcatcatcgtcatcattttgtcccaaatcatctatcatatatgaatctataactgcctttaagtctctactgattctcggatgattcgaacgaatgagtaatgtagaatacaaatcttctactaaaaatgccaatgaagaatttggagcattatcacacaaaaactgtgttttgccatactgattcatccaaacctcttttgcaaatgcactcatgtcatttaccctatgcacatttttgcagatattcattatataaagagttgctccgtttttcattcttaaattgaaacaatctccttctatagcagtatgacaatcgaaacgtttagacgtcataacaactcttgtcacttgttcaggatattcacattcactttcttcatagaatgtctcaagactaaataacggatgttctacgtaaccgttcatgtctgtttccattctatttaaaaaatctgccgattctcttacccaatcaagcttatcttctaatgtatcttgcttaagtttttcaagaaacgctatcaaatagcgctctgtcggcgttaattcacttaaatctacattaatcaatgtatctacactagtttttaaagcttccgctacttttacaacaaaatcaatacctggtttagattttgcatcttttgcagttctagaaatatatcctgcactaactcctgcttctgcttcaagttctcctatttttttaccgaactcagataacataaacgaaatatttttaagcatgaggtctttattgaattctgaactcattttctcatcctccttttacttttatgtaaaaacaatatcattattttacatttttgtcaagttctttattttattttactatatcgtcatgtcttttctctttgttaatatataaaaagcctgtcaaagcatagagatcattaatctcatatacttcgccaggctttgctcactacttactgtgtggcgattcgctcagtacgaattttcttatgatgaaagctaactgcaatcacacctctacaaacaggacattttattttaatgattccttctgtatccggatctgcatcaaacaatcttttatttttacagcacggacaagctacatgtatttcatccctcatggctcaccctccaatcaattaccataatcatatggaaagctaaatcttcttttttcttcaacccttgctaatattttcttttcagcttcttctcttaaaagaaatattcggctttgtcttaactggatagcacctccattcaaaaatcgtaacgtgtaaaaatctcctcttcttgctgcaactattatttccatgatagttcgattactttcaataataaatacgtgtgagccaacttctggcctttcttgcattttcaacgcctcctcttttaagaggccagttaaaagggaaagtcaaactgaccatacactgattattactatttctgtttaacatttttcctaatgtagcgataaatccattatgcgaacgtgcgttcaatttgtcaacgatatttttcatatcgcgcaaatcaagttaaaagttaaatcaccattataaagtaaacattcaagattgagggggtacgatcatatctgatgtaatttttccttataaagcttttacaattcaagccgtttactttttccaaaaggtcatgattaaaacattcaaagctaaactagcggtgatcttctatattcatgaaaagaccttttctagaacagcggccgaattttctatgttactttgaattttgaacttttgctaataaaattactgtactgttatgttcgcacattcagcgtaatccatatttaaacccggatcaatccagtctttgtttgcaataacaacttatttgcaggtatcgtatacactattttaccacaccaaccctttagccacttcaatcaaatagtaaaaagaatccgctacatctttaattttcgtatctggtccccagctaatgcggatcgaactttcaattcgatccgttgagagccccatagctgtaagaacataacttggtttatatgaattcgaattgcaagcagatccattcgaaataccacaatatgcctttgatgaaagcattagtgcctctgaggcaacccctttaatacagatattcattgtgcttggaacacaatattcttgatttccattgaattcataatctaaacctgaatcatttaacactctaaccagtctattttttattgctctacatttttcttgattattcttatactcttcttcggcaaggttacaagcatgccccaatgcggcaactaacgccactggtatcgtcccaggtcgaataccatgctcctgctgaccaccataagttatggctttcactggtgggagtttatatctctttcgtctaagtattaatgcacctattccctgcggaccaccaatcttatgggcgctcatggacagcatatcatattttaaagactgtagttcctcaaccaatttcccaaaactctgtgtagcatctacatgaaacaatatattctgctctgccaaacattctccaatttctctcactggctgaattattccagtctcattatttacgtgcataacacttaccaaaagtgtatcagctctgactttttccagtacttgttctacagatactctaccatccattccaggattaataaaatcaacttcaaatccctgaccttgcatagctttaactgtttctaaaacagctttatgctcaatgctcgtcgtgataatatgtttccttccctcagttataccataagttttcagcccttgaataacgatgttattgctttccgttgcaccgctagtaaaaaacacttcgtccttattaatttttaaaatagatgaaacttcccctctggctttttctactatctttctagaattatctccaaaaacatgtgtcctgctatcggcatttccaatatttcttcgataaacatcaatcatataatctaggactcttgaatcaatgggggctgatgcgttgtaatctaaataaacacccattacttcacctctactgcaagattaatcagatcatccaaatgcttaataaaatttgtccctgacaaatgtgcaattcctctttccaaatgaagtttaaaatacttacttaaagtctcgtcgtctgttggcaatcccattctcaaacaccaagctttcataagagcatcatacaaatcactatactcaccagcaaaggtataccaagacatttccacattgctatctgcattaatcggaatgtccgttggcatagtatactcactaagagaataacaaaaagcccacctacacaatacattccaattctttattcctgtttttcctttaagtcttcccaacttgtcttttgattggcctgacaagcgtatttgtttcaccaacattatgtcttccctccaaagaataaataccccttttgaattgttgtcttcttcagttcatcatcataaacaagcgtaaattcatctcccacacttggcttcataagtgagtaatatttctcatcgatttcagagtctgtagagagaataatggtctgatcacttgcttttggaaaataagttgtgattagtgcttctctatgaatagagtccaaccttgataatggcgtatcgataataactggtaatttcttcttggaacaaattgccagtgcccacagtaacgaaataaccatcaattgcttctctcctgccgacaagcttttcttctcaacttcttcaagatctgcattcagataatgcagatctagggtttccggatccatcgtgatcttatcaataagattcttcttattagcgagctgcttataacattctgtcattgtctgagccagaatttccgttttactttgctgcaaacgagttttatatgctctaataatcttaactgccatatgggcatacttaaccgtacggttatcatcgtccatcgtctccagtgaagtaagtacctgctcagtggctttattaaactctgctgccgcaatcatcgccgaaccatgaagtgttgtccgtttctgattcaacgcatcaagttctacctctgccgttataatctccatttcaagagatttgatctgtttaaaaattctcttaagtactttttcgtcaatgtcaacagaaagatagttatctatctcgtcaatcttgctttggcaagcatttctccgccgcatatgtgaaattgccttttccttttctgatattagaccacctttattaagtgtcgtaacctgataaagagttgtatcagatatttgataaatctcttctccctgttgtgattcactttcctctttaacgtactcaataaatttctgtatttcatcaccagcattgggatacttttttagaaagtctttataaagggagtttattttttctgtcgccatacgcgaagtacgatatgactgttcttcctctccttgtttctgaatgtcttttagtaatgatcgaactaacagcatcggcattgctccagttgtcatttccagcaaagcatcttgatggctctcaactgttgccactgcttccgaacgttgcatcattaaatcatgacgctgttcaacaatatccccgcctttgatagaatactctgcattctttttttctaattcaactctaaggccatccagcttttcttccgcccgttctatttccgcatcagcagctttaagatcttcacgggcattttctcgcttttgtctcagaagctccagatacttaagattttgatcttcagtatctttattacttaatttagtgataattcttcccaaatcattatccaacaaatcaagtacagaaatacccaataaagcctttatggattccttcattttttgattggtattttcaactgctaattctgcaattttctcaccatcaaaaaagaaaaaattagacaaagcacttggcagaatgttttctacaaacattggccagttctctgtaagaaaagcattctctgttccgttcttctttacgattattttttctctaacccgctgggtttttgcatcccactctctgtgcacaaagtagatttcctcgtcggaaccatccatacaaaattcaatttctacataggtaattaatgttccatctgatttattgacatatgatcttaaatactgcccataggttttatatttactttctgtatatgcaaacgaattggagccgtacaatcccagaagaaccgcctcgaggaaagtagttttaccacgtccgttcatgccgcccactaaaacaaccggtttttctccgtggaaatcaaattgatttgtatcagcataaaccccaaaattatgcatgattagttttttcaaaatcatgactcatcgtcctcttcttcatcgtcttccacatataaattatcatatgtggaatctaacgctttctcattatattttccgccaagatccttcttccgaaccatccgattcatatagtaatcggttgcatccttttcattcttataaaaagttttctgaatacacgcttcaagagaatcaataattccctttctcttatttaagctacttgactgattttcaatatcaatcaggctataggccatttcaaaagccaattcttcatcaggatataattcttccacaacctcttttaggatattccattcctcacttcggaacgcctctgaaccaacccactcaggatcatcaaatttctttccgaccacatcctcatagattcttggtagcgcatcatcaaattcatgtttatcaaaaacccaaatcctgcggatatttctaagttccggaagcgtaatcaattccaattcagcaaactcttccggaccagttgcattaatttccatttgaatttctaacagttctcttaaccactgctcacggtactcctttttatatggtccgtggtgcagttgcttatacgatccttggagaaatccatgcatttttctaaagctccgtcgctctctatcatgttcctcatcgccaaatctatttctgaattccaataagggcgtcatccaagatttctcatcatcatttgcaatcatagcctccatagatttatctttttcaaccatggtacacacccaacatccaaatcggctctttccacaacttgggagccctttctcaaccatcataggacactctccatctgatgtagcacccttatacaaagtaagaagctccttatttgaataaccccatggatttctatattgcatgagaaatacccaaacatcattatcattccaatcttcaagtggagaaaaaaccaattcattagccatggtctgattcgggcttaataattcccgtaccctttttttctcatagtaagccattgttttcgctctccgggcactctctgcttttcttgttccaatcacaagaataatctctccatgctccgcaatctgctctttaacaaatgtattgaccggttgaatcttcaaacgatccgtgcaccatcttaatttttttcttggaaacggatatcctcttcctattaaattcacccaaaaggtattatccatcgctggggttaatcgatgcgtaacaaacggcaaacattcttctcttgctcgctcatccataatatataaagagtttttcacccagttagatataactggagactcgactaatgtatctgtattgattacatgtaccgttttcttcaattgatccttgggcagctgttctaatgccagccaaaccaactgtagtgttgcagtactgtcttttccacccgagtaaccaatcacccatggaatatcgtctgccaaatacaaattacaaattgtttcttttaatccttctatcgtatctctatttattgttacgccttgcttatttgcttcacagcttacacaattctccgccatgttcatttctcctagacattataatttgcaagaaattgctcttcctttatttgttcttcctgggttaaaggaatacctaattgctgtttgatctgatttgctgctaggattatagccttgttgctcgtcagaatcttcccatctgcccttattacacggaacttccaacacgcagcacttcttttccaatcaattttatttaaaagagaaacagcctcttgcatgcctacatctggattacttaaaaaatatgctcctacataccccaatgcctgtatcacaacgccttgtgttacaatatagttttctcgaagatccaccttagatatttctttattctgaagttcattccactgaatcatgttctcacaaacatttttccagtaagagaggacaaattttttagtctctttagtaatgcgctttcctgccaacactttcttattagcgctataaaacatgttcaatgtaaacagatttgacgaatatttgccaagaatatccttctctttgtctgtatagtcattaagaaaagggacactagatacaacatttctcgtaagcacagcaacatcatctctcgaatcataaagttcagatatagaatttgatgtctttacagcatgtttattcagatctgtaaatatttgttgacttctcgacaatccagcatcttcatacagtacaacagatattgtttcattacccaaatctgcttcttcatttacagcagccaaaatagcagccttcctatgctgcccatcattgattaagaatcttgcgtccatagatacctcaagtattcctatatcactactctctacacttgggaaaaatttgaattccccatcaatggatgcagctaaagctgagaatacataggaattccggttttcagtgatatatctactgattaccggaattctggattcgtttaattttctctgtgcacgatactcaggaagcacatattcttcctcattcggaaataatcttcccaacattcgtaacggtatcatcgcaatatagtattctcttcctgcctgaattcctcttacaaccggaaatttatatgcaaaatccatgtatacctccaaagataaagtgctatacttaagtagtctacttaagtatagcaccgtcatctttaagcgtcaatcttctttcatttctttatataattcccagaaggctttatcccttacatatttaggtttttcagaactaattttaattatgctattatgcttttgtagcttctttatgtcattatagagcatctgacttcctgcactcttagcctctgtcttaaagacaaaatccacatcactattttttaaatcagcaacattatgcactacccatgtcaaaatatacttcgcataatcatcctctcctgaggcaaaatgtttcaaaaattgtgtcgataagattgtaccaacaccaaattcacggccttctttcaatattttcttgagagatggaaaatcctgtgacataaagttatcggcttcatctactaaaatgaattttgtcaattggcgataccttccctctaatttactcgatcctactgattgcatctgcgtataaaagagatccaacattattgcaataattaaattctgcaatgttgatggatagcctgaaagatctatgacaacaacgccttttaacacatcaaataacgattgtgtttttgatggaactttttcaaaaacctcatattgacctaactcatccattgcagcactcagagaatctccttttttgatatcttcatcatttaaatatctttggtaaacctgatcaaatgttggagcttcatttttccatgattttacatcagctttatatatgccactcgcctcatatgtttccataatacaattggttaatattgctttctgcttcggtcccaatccgtatattttagcgatcgtgtccctaaaattattagcagtatgtactggcaataaaggtttgaacacagatgtttcaattatcgcaagtgggttgataggcaatgcatatggtttaaatatttttgcatttgtagcatcgacaaaatccattttactttcattatagtctcccttataatcgaagattaatattcccagttcttcatctccgacatttttctcttgagaacgatataattgagttatcaaagactttgtgaactgcgtttttccggtccccattgtaccaataattccagtatttgtatggaataacacatccgtgttatttggttcccacaaaaccgcctcaccattctgtaggttagtcccaaaaagaattttcatacccaacgctgcatcctttttttcttcttccagcttatcggccgtaactaatggatcaggcttattatctgaattttgtgtatctggattttcttcttccgtttctttctgcacaggaatttctttttcttcctccaattttgtaataactattttagaagtatcaccagtcagagcatcaactgtacattcttcaaagattaagaacttactgtcacgcctccgctgaatatccttatagatatcttcaacagagtctaaaatcaaatcaaattcatctgtttctggcatttctatgaagttaatggtatccgccttaaatgatgttcttcttgtacctaatgcttttctaaacgataacactgcacctttgccgagaagttcctggatatcgtcagaaataacataattctcattcagaagcgccattctaaattgatccagaataacatcccagttttgactatcatccacatggtacaccttcatctttttgcagctagtaaccagtaattgcatcaaaaaattacgattaactttatataaaattgtaccattaatattttcttccggattcattgcattgtgtaatccagaagcagtggctgacacctgctcaaatgctttagtaatgacagaattatcatttatacccgttttaacttcggttggatacaaatagatttttgcatttcccgccacataatttaagcctataaacagcaggtcatcactggttggccctttttcaaagccaaggttcttataagacaatatgccctctgaacttgacagtccaaccccaccagaaacacgtaacatttcttccaacgaaataggaacccaaacaatattcggatgtttgagaaatgcaagcataaacttaatagctgcaacaatgctaatcttctctctggaaaaggtagtgtctttatttgcaccaaccattttcttcgatgaaaccaaacgtagcaaccaatctccattaattgcattaaaaagatttatgatttttgctacatcgtctaggtcggcgtttacccccttttcctttaagtactcttgaataactttagaatactgttgcgatttatgagtcactgttatggcatcatatccactactagaggtatactgatcactataatgaataatcagcaaatcactgtttgcttccttttcgctaaagaaatccagatccaccttaggatcaacaaatacaacccaattagacgccttgtaaatgtattccattttctcctcagctttagaatcaatctgggtagaaatacttgtaccagaataaaatggatttccggtgtcacccacctgaatcaatgcattatatttttcagccaatttaacgacatctgtcttggtggcatatttggttccaaacccagttctatatttctgcccatatttacttgatggtacaccagacacaattccaccaagggatatccccgtttcaatctgatccatagtagccgtttcagaagtaatttctgactccatctcatagaacgaaatatgcgcatactcatatttatcaccctgatcaatatgaaagtaacattccacatttttcgacaatacaccctctaggctattcatggctgttccgtttgcaatggagagtttcagctctgacaagtattctttcaaccgtgtatattccttgatattcgaaaaagcattggatgatggatcgtcagtataaatatggatttcaaacttcttgaggcggtcaacatctggcgttttattcaaagaatgtacaaaaaattgtgctatgccaacaaaaacatctctacaatcgcccatattgataagattaaggcgtacagtcttattatttatatcgtcaaaaatatacttgaaatgtgaaacaaactccgtaatcttctcttcaatcaatttaggaacatatcttcggttaccgcgatatgttctgttttccactggagcataatacttccattcctgcgaaaaaatttgatccgataccctgtatattttcttgttgcgttgcaaataaggtaataaattaatagagtttagcctgtcaattacaacatcagttgcaaattcaaaatctgtttcttttaacaattccaattgatacgcaagattcaatggatggaatggtgttagtaatatttcttctgcatttctccctactgaaagagagcctataagaagtgcattttcctgttctacagaaaggttcccaccgtcctttatcccagcatataaagcagtaaaagcattcaaaaagtttctaacagactcaagcagattttccgacaaatatgctaatgttggtacagttgaattcttctgaaattcgtccaacatagcacaatatgcctcatgtaattcaaagttctgtttcaattttacttcctcaattttaccgatctctgctcctctgaattgacgacatcttccacactctatatgattttctatgatataccgttctaaccgcaattcccgcaacagatttgttttagcaaaatattcctgtgaatctttgtaaatatgatcttcaggatcaatttcaaaactatgcctagacgcaaacttatcccttaaaatcttacggccaataatttccatgcttttagtttcgtctggataaagagcaaatggaactactacccccgcaaaattaatatcaatccttattccacttccatagtttgacagttcttcttctgtcgcatataaatggagcctctcatcataatgacaagtgtactgtgaattatcgtccagtttctcagaaacatttgctgaaccattcagattaaaggttaaatctgttccaataccaagaagtttaattttacaatttcttctgtttttcttgtaatctacgatataattacgtttgattgttccagcaagatattccgcggaaatatcaataatacatatcttaaaaatataggtaatattattaacggaatctccgatctctatcttatgaaacgaaatatcttcgcgttccaattcaaagatcaaattctttccttctcttgtaaatgctgtatcatcctgagaaatatcgctattcagaatacgtgcattacactcaaaacggatatggataactgggaatttgtccggattaaaaactataaggcttctaatccttttctttgctttcatagatccgtcattacgaatcaataccttatcatctaagggcaatgcattaagcggcatatctccgtagacaaaaatgttttctggatttatctgtaaaggattatccttcttagactgttttttctgcattgcagccaacatttcttcatatgtaaacagtctgctccaattttccggatcattctttctctctttctcaattcgattgataaaattttcctcaaaatcatcaaacaaatccgattcaagatttccaaatcttatgctttgatcgattcgctcaaacaaatcatggttattcttaatttctttatcaatttggatttggctgaaattctgataatccttctttccgttaacaggaaacaatcgaaatccaacgtaattactaacatcaataaaaccactactcatgatagacaagaggtctctgtattcatataaagacgctttgtcactaaaaacatctgcatcacgtcttttcaattcgaaacctaaaatccgtttttcaaggaacgtcaactgcgtgctatcctcgaccatactctgaatttcactcatcagattatctgcataaaatggcataccattagcacacatatctctggacccactcttagcactatcaataggattagccgaaattataagtaacggctttccttcatcatttgctgcattcctcaaggtcgcacataagaaatcattagtcattccattgatctgagcagcaataattacttcaccatcaattactcttaaagtatatgtacgataaacagatccatccctacacatatactcataataccccatagcattgttgttattgaccaattctcgcaatgcaatagctacgttttctacagtttctacatcatccagttttaagcagaaactttcccccttttgtagcagtccatctgcagatagtgattgaaaatagctatttattttttttgctataaaatcatagaattctcttaacatactgcgcatccccactatcactcttcttatcaatcagatttaactttgtaaaaaattcttgcaagtgctctttggacgaattatcaaggaaaattcccctgtattcatattccttatataaatcatttaatcgaattttttctttatcacggagcgatatctttgtcaggaatataatatccctttctgtaagattcagaaccaatccagacttacgtctattttttacccatcttaccttacagaattccgtgaatttttcattataggcctgatttgctctctttctgtccgtatttagaaattgttcctcaacacatctaaacaaatgcctaatggctacgtctgtcttgctcccaccctgagtatacttaatttgatcaaatttcttatagtccccaactgcagatgtatatgccttttccgctttttcgatctcttttgaaatgcattcatccgcctctgggtgaagattaatatattcctgtagtgctatgtaatcatacattgtatgtgaatccgcatgttgattaatgatctccaatgtaattgcatgactaaacatatggttaatattcacctgtagcttttcccagccttcactgcagcacttacgattcttactaactttttcccaatctaatgcataatatatgctaaccgattcgtctcttcttccttgacaaaactgatccaaggtaatgcttgtctgagaaacataataaaagtaatacaaagacagaagattagaaaaatcttcgatagacgtcatatctatctgtaacatgaaatggaagtccttcttaaacttttcctgcacatctgttactacagaataataattcttttcagtttctccttctccagaccccgtggaattaatagccgccactaccatctgttccaaaacattatatggatatctctcagcagcctccttgattacatcgcagtcacgctgatcgattccaaaaatgcaaaataaaaaaaatgccaagcgatccacactcttgttgttggttttcatttgataaggatataatcctaaatttgttgccacaaaatcatcactatcgaagaagagttctttaatcatgtccttgaacaattcgatatccgttgactcgatttcaagactttccaataacaaatcacaaagtgtatcataatcaacagccactgattcaacatctaaagctctcctgaaaaatccactaacgcattcttctaactcagtaactatcggtgcctgtctttttccgctagctttatatggatacaacttgaaactattatctggtatatgtgaaagtctcagtgaatcagcggatttttcttcagcagacttaacattaaaactctcattaaatttcatttcatcaaagatgtaatccattatttcaccaccttaaatctgtaaccgaatttcgtacgttcaatactagcttttcgtccatcttcagaaacaacaagaatattttcttctgcagaacctgtctttaaaattttctcaataaagctaataaagtctgcgtgattattccgatcatccgccgtctgtacatacccttgcttcaatttatatagcagttcgtataatgaataatctatatccaatgcaattatgtcctttggcttctgattttcgaatttaacaacgatgaatggaataaactgctctaatgtagtggcatattttttagcatccatatcatctaaataaggttcaaattttatatcctcatataatgtaaaaccttcatgggattcatctaaacaaatggtacttccggattcacatccacaccattgaattacagccttttctaccaaatcatacatctgcgccaatttagggatctctccaagattgtaataataaagatctttaatgtactgattgtatacttcatcagcttttacggttccttttattgcctcaatacgaactagtatattaaaaatctgtgcctttaatattttatcgttgttcagcttgtccattgttccctgttgattgagaactacagcatacggcgtatcatccaatatcctctttatttctgacgaaacatctgaagcaacatagtaaaaaatagccaattcatcagccgattctgaacgcaccagtaacggatcatattttcccaactggtttaaaagtaatgacatatccgcatagtcgaacataaggactggtgtaatatcctccagatactccttcaaaaaagtagcggtagtcgttgatgcatttgatatagctttatagctaaacttatgtgccaccaaaatatcataaatataattcaatatttctctggtggtaagaatctctttttccttgattgtcacctcaactaaggagtttgcaatatatttctgtacttgctcatccatcaagaattcataattatgcttaactggacatttctgtgccagtgggcatgtttggcaaaacttctgaaatgtagaaaaaaatgggtttttttctatttttgcaaaaactttattcaaaatctgtaagatatatcccggttctgctcccccatctgacaacgtatacatatgataatcagaaaagttaacatgctgaaaactactgtcttttatgtaaccattatgatttacagcagttgtcaatatattattttttttaacatactggagaagcaattgataattctccccataggaagactcaataaaattactcagcacaccaagattaatggctagaataatatttttcccttcagaatcaatattctcatccgcaaagtcaatcaacacctcatttagtgtctctatagcggtttttgaaggtgcgctactctctgtggcatcgttatacaccgaataatcgtctaacaatctttcttcatttttaaggtaagaaagcaaatgagattttccgtcccccgaacttccgcacaaaaggattaatgttttttttccagaattattaactgacgcaagtatctcttttaagtcttcctcaacattccgtgttacatgcatatatcttttaaaattatcaaatctctcaatattatcgatagaatcactggatgattttctcaatcggtttaattcatctaaaaacctacaatttgccatacaacacctcactgctccgaggacacaattgtcaccacatcttcgatgttgcaattcagtgcctcacatatctttaaaataatagccagagagaccggttcatttcttttcatctttgacatagtacttgtactaatgtcagccttctgacataaagtagccttcttcattcttttgtcaattaaattcttccaaagattgttataacttaattccataaattccacctctgagaattactcgcttaaaaattcacttaattaccttcattatatagatcgggcagcttttcatcaacagcacaatccacaaaaactctgttttttcgttatttttgatgaaatcaatctatttttattgtaaaaaggagaatatttactgtacggcggtccaatcgtttcctcaataagtctatacaatacaaaaacgccccacattcctgcaggacgcacatctattttaattcccggctgtagtagtctctcagtagaacccttttaacgattacccggaggggttcacttctatctatactctcttaacgattgcccctacacaatccgctttaactcccctgagaagtagtctttcggtagtcccgtggcactatgaccgacggaatttgcccagttctacggcacttttacctacacatttggtagtccgttcaccctgccgtggcagataaaaagtacttttatcatagttttaatttactcctttttgtcctaaaatttcctcttttgcaaggttttccgggtatttttgggggtactctgaaatgcgtgaatgtggcaaatcagagcagaatttagcaagttattactgcctgttaatagtaaaacggggatgggttactactaaggctttataacaatcagaaaaacaaatctcctataagtattgcatgatcaggatatcccgataaatatttccaatctgataagtcttctccatttatatactttctatccctaaacacgaaacacctatcatagatttcattttctatttcacaattttttgtcacaaaatgatcttctgcaaattcatattcttctcctcttattgatcttttttctttaatactttgacctttaggagtataaattctatattctttattatcacataatattctaccaatattccagtcttttaactctgttcctcttcgataattattaaaatcaccgcccataatcactctatcaaaatttttcaattgtttgtatacatattgcatttgattatatctcttctttgcttgtatctgatatgctttctttttttcgtcttccgttccatttaaaggaatattctctgccattgtaattctaacaccagcaacaactaattcttgtcttgttttcttttcaattaaatccaccagcaaaaaattgggtttgttattttcgaaagtgacaatagaatatatacacttgtcaatgcacacatcaaataattctctacgccatgctattagtatctcattctgctcatttttagaattctctgttttttctttaggatagtaatcgtaatttctcccatcaaatacattttttaaaaactctgatgcattctcacaaaatgaaaattctgtaagaataagtatatcgggattttggattataatctctttcactaataaattcggaagtttattcattccatatttattggttgcttgattaatattccattccattactttatacctgtattttaacttggttaccgaattcttccaatcgaccaatgttttccttatattttttaattcatcacactccttattagtaagcattaattctacaaataaacttgccattcccggtaaatcaacattctcttcttcaaaagatgtatcatttttaatctctattcttttctgcttcaatttttcaagataatttgcttgtaaaagttgaattaaatactgcgtctgcaatatttttatagaatcttttaactgaaataggatgtcttctttcaccttttcaagtatctgcgcagtttcatcactatacttcgcttgtatgcctgtaaaaataggtgcatcttcctcctttctcaaatcagaaagtattctctgaatacacttccagtcacttacctctatagcagcataaacctccctttcaaaaactgctgctctagacatatcctgcgatgcatcatatttttttatcaaatattcaaatgtacaatgcttccaattactttttatattaatcaaattgctcataagccctcctatatagtattatgcaaataccgattattaccttctgatcatagcattatttcgtattgttgcaacaccaaatattacccatcaaaaataacgccccaactataagccagagcgtcacatatcttctatattaaattgccttaaacatcttctgcgacatcggtttctcattcttttttcaacctcagcctgtgcctttctaaactcttccattcgcttaagttcttcctccgcatcatcaaatccgatatgtgtgtacacatttattgtaaccgaaatatccgaatgcctcataaggtactgaagtgtttttggattcattgattctgactgtaccaagatccgtggcacaggctgaaaaatatgggcagtttttacattgtttttttgaacggctatataaacggtaatagttctgcgttgactttttataaattaatttctgaaatcctaaatattctccctgtctacatacaaagcgatctgtttcttcctcataacagaatccttttttcattgcattgttctgatattcacgtataactgtataaccttggatttctaataactcgagccctctgtgtaccgctcctatatcatatccgccatccaatccaatttcctgatatttacaaggctgtcctttcaaatgttccagaataatatcactttccctctggttggccgggtaacagtccccccggtaataatgccatgcctggtatccacggtcatctccgtcagataacctagccactttttacgagcctggtgaatataaccacactctggatctgtccggctttttaaagattctttctctttttttacattctccggttctttataaccaagcatggatgaaagctctgcttccaatgcttcttgttccgtgtaaccacaagtttctacaattcttccatggaaagattcgatacaggcgttatcccatggatgtaccttctttgaataactatgaatcctaacttttgttgctttttaaaatgcttccaatacgtactggcatcctaacttttcaataatttcataagaactctctatccctattgtctgatcatttttatctccaagtaccaggacaggacacttgatttgtcgcagttgttcataaatatcaaatttcagaattgcattcaccagtatacaaaaacgcacgcaatcctctgcacttccattcttttctaacgaagaaaaaatctcttttacacgctccagaaaatctacagaatacacaacattaaaaaattccgattcaatgcctctacattccatctatcaggatgtctggtggcaagaacctgcgcaatcattccccctgtgaaacaccataaatataagcggcatccacatggagtaaattcattgctctgaagatatcttccaccatatcttcaaccctataacctatctttaaaattttcttccactcaaacaaatagacggtatagctttctgaaaacgttcgacatgcttcagctaccgtttcaccctgtccttccaatcctgtcagactaacactggatataataatcactgtttcgcttccatttccgaaaggaatgacatttatataattatcatccaatttgagttttatccattttgcccatcacactttcaaatttgtagtattctttataaagatactgtatcctatcgttattgtcataagtagctttgtatgattagacacatggcaccttggttgatggttcatctattctatttttaaatacgtttctattttctctatcaaccccaaatctgccggcaaccattcaacactatccaacgtctctctcgtcagccactttgctgcctcatgctcttttagcaccaaatcacccgacttaattttgcagataaaacatgccatggaaagatgaaactttggataatcatattctaccgtatccaataactcttccactataatttccgtatccagttcttctttgatttcacgaactaaggcatcttcaagagcttctccttcttctactttccctcccgggaattcccatccatctttaaattctccatatcctctctgtgttgcaaacactttcccattatcaatgatgattgctgctaccactttaattgtcttcattctttttctccacttcttcctattttagcttattgcactgtaaataacgtagtaaatcttctttaacaggattttgcattcttattttaaccttagcaatgtccctttcttttcctctattgtttttcttcttgccaggcaataattctactatatcaaacatacccatgtagcaaaaattagtttctgcatcacttttttcacaaaaaggtgtttacgttccgctgtgcaaacctcttccaatctgtgaatcccaacgaaaaataaaattatcttcaaatacatctacataatctggctttccatcaacataataaaaccatcacaaataactgctactacaacatgtattgttttcatagtaaactcctaacttgtcatatattcataaatatcatcacgaacaggaatatccaacgtataatcaatttcaaatgcatcatcatttgttttttccatcttaattggatttggtattccatttgcaaaaatttcacctaaaaaatagaattcctttgcctctttatcgtccttatttttccgaacaaagagaaaaatcctattatcacggtcctctgctgtcctcttatagaaatggtcagcatcaccagaatccacttttctgggatgtttggataatgctattaacttctgatttgagatgaaacggtcttcatacgcaattgcatcttccgccttatcatagttgataaatacaggaagtgttttggtcgctgtatcataaaaatacccgccaatattttgagcattcagattctttttccaattcagtaatctacacacatcctcatatgtatacttttgatacaattgaaaatttgtatctttataaggctgtgcatatttatcttctacattttctatgccgtattcaattagttcttcaaccattttcaaaaattctggattattcatcaataatgccttgaattctggatgcaattcatatccttcccccacttttttaatcaatacacaatcgctatattttttccgttcttcttcttttgcaaattcatttgtcaaattacgaacaaccgaatcctccaccacctttgaataagctattttatactgttctggcaatagtttttcaaaatatgtaagaagtctttgattttgtttgattaaatgtttcaataccaataactcatgaattcgtttcatatttgtaactttcttagaaagaaattcaataatcatctcttcctgaccgttcaaacaaattgtaaaatcctttgaataatatttcttcaagaatgcataataggatccaaacttatcgaaatattttcgcacttcaatagaaccatattctttaaaatctaatactgtcggaattcttcccaaccgataacgcaaaatctcaaaagactctttaagtaatttcacatcattagtccttgcttgatctatagaacggtagattcgttctctggaaatcacatcaaaatggattgtcgattccccaggtataacacgtgtaccttctgacacatatcggcgaattgtatctttgttataactgcgatctccggataaagcgattggaatcataaaattattagtgtaattaccaataaaatccaaaatcacaacgtactccttattttctgcttttctaagtccacgtcccaactgctgcacaaatattactggcgattgtgttggacgaagcatgattacctgatttacacaaggtgcatcaattccttcgttcataatatctacagaaaagatgtaatctaatccaccttcatactcatcctgctctaaacgttcaatagcactttctcgtttttcctgagaatcatctccagataaaaacactgttcgcaaaccacgttcattaaaaattttagataattctcttccttcatctttacgactcacaaaaattaagccttttacacgttctccattataaccataatactttgcttgatttaagatgtgatctactctcgccgaacatgttaattgattaaaatcttccttttcattaattgtttctccatcaatcaccaaatcagtgattccataataatgaaaaggacataaaagattttgttccaacgcttgttgcaatcgaatttcgtatacaatattgtgattaaataatgcgaatatatcaaatccatctaagcgctccggagatgctgtcatccccagatagaaatttggtttgaaataactcataatcttctgataactattggcaccagccctatgaacttcgtcaataacaattgtgtcaaaatgatcaggtgaaaacctctgcataatctcatctttcgccattgtttgcattgtagaaaaaatataatcttgtgtaaaattcttttctgttccagatattaatccatacgttctgctagtcccaaatatacgcttataacttttcaaagcttgtttcgcaatctgttccctatgtaccagaaacagcactcttttctgcattgtttctctaagtgcaaaagctgatgcgtacgttttcccactaccacaagaactaaccaagagccctctatgctcattattctctaataattttttgaaattatgcgcaaatctctcctgcatcttatttggctttaacttgtatgcctgcaaatcgacggtcttctctttaacagcattcttcttctgctcttttataagcttatatctcaattcataagtctcaagaaaatcttctaccgcataagtgtgcgtactattccaaagcgaattaaattccatcatcatctgctttaacatctcaccatcggaagtagaaacaagttttgtattccattctttattcactgaaaatgcagaggctgtcatattagaacttcccactataaaacgataaatttcttcctctttaaaaatatatccctttgtatgaaatccgcttgctccttcatccgtagagtcatatacccgaacctctacatttggcaactcagatagtgtttttaatgctttcggttctgtaaatgaaagataactcgttgtcaatatctttccaggaacacctttgtcacgcaattcagcaagtacctgctttaatggtgctaaaccaccttcagttataaaagctacactgatataaaatgcatcacaatgacgcagttcactctcaattgcaactgacacttttttcccttgcttatagtcattggatacaaactcaggcctatatgctaaattagaattaactgccgaatcaataaaagctgtatctaacccccaagaaatgtcatgattaattcttgactccatctaaatcacctccaatattatcatttataacttcaacaataatgtctttatcaatcattaatttaaatatttttatatgatatgctcaaatttttcctttatctataacataaagatactaacttgaattataccatatacttggttgtctgcgggaataaagtttgcggattggctttcccaatccaccctagccaccgctgactagggcctctattcaattacaggcaatctcgatcccttgattttttctgcttcggtttctgaaattgcttttcaatttctattttcttttcagccagccgcgctttgattccaatctgttccattcctcctgaagctgttctttcgctgttagatctgccttcgtttgttttagctaccgttgcaaaatcactcatcatcggaatcgcatctaatcttgatttttctttttccaatcgcatcaggttggaagcaattttgtcttcaatttctgtttcagtctctctatgtccttctcgatcgcatagacttttcgattaccggcttttaacttttcatcgattgctgtcaaacgcataatttccagctgctccattttcaatgatggatataggcctttggcgattgaatttgaatttctcctgcaaaccagacattattttgtttttcttcttttcttaactttaaacaacaaaatcaaaatgaaaatcagaataattactccggatatcactattactatattttgcattgtcattaaactgtttccaaccaatgtatacaagctgaaatgtgtagtatcaaacacaaaacacccatcttcaatttcaacatccctctctgttacatttccatcatcctcaactcgatatatttttgctttacctgcataagcaagaagctttaagtcttctggaatcggaatataaactgttacttcaccgttcggctgcgtttctgtgccattcttcatgaaagatatattgtaggtataagatgttccatttattattttctcataaacttccggattaactttttccagaatgtccagtatcgcagaatcaagagtaaccttgaatatatttaaagaggtatcctccgaaaatccagcatcggattcaactgttatttgttgtgaagatcgaattccaccaccttgattctgaatgtatattgaacctacattcgatgattgtatgaggtctgcatgctgtatgattatattttccaactttccaaatgcaaataaaccatcaaaaaccatcttgacaggacctgtgaaatatttaaaaacttcctctccaacactccatccaaaatcttctgcggtatcagcaataagctctcctaaatcaaattcactgagatttttagccattgtgttacaaaaatcccccaatgaatccgtggaaaatgcagcctctttcgctacgcctttccataaatcttcttgtaatttgcttccatctttgaccaatgtcgcaaaagctttttcttttaccaactttagcgttaattcttcactaaatacttctgcattaacatcgtaatttttcactttatttgccaacttaccaagtgacattaacacatcaacggagtttattatattaacaatggcagaatttcgaggatcattacaaattttgatatatccattttccggtatttgtatgctaactgaagtcttttttgaaagtccactctcttgacgatagctcaggaaatccccgtcgatcatatctcttataagacatcccgtattgtcccacaaagcctttttgatacttgtattattagaactcatttttttaatcagaacagcatcctttaaagtgccatctttattgtaaacttcaacaacaccgtacgtataatttgtattataaacatcgaaggaaacctttgcagttccgttatcatttactgaataactataactatcaacatatagcccattggcattatatatatttgttggatatttttctatatactgagtgggtacggagttcaaagtatatgaaagataattatcctcataaactgtaacgggaactttagcagtataaccagtattagaatcactgaaataaacatatgttgtaccaatgtctattcctttgtatttcacatacctccgattgccttttatgtccgtatcactcatctcaagaatcgaagaatcctctgtccaaaaagtaattcctgaaacatcgtcaatttgttctccaccaataatgataccagcactaagagttatcatgctgtctttacgtatgctaagattctgataatcggaataaatagtaattccgtcatctatttccatttccataatatcatcttcaactggctcggttacagcatgatcaccgttgcgtataaaagcatagtcaatctgataatcaacctctgagtcgtagccttgataggtcagtgatgcatggaaaaccataatcatcttttcaactgcaccagtttccttatcaatcaatacttctacatcaacatcatcatagtccaaatcctcaatgccggacatcatattaaccgcggcaattcccgcttcctccattttgtttccgggaattgtaaaggtgattttattcccagatacctttgctttctccatcatatctgtagtcatagcattaaagtcgaaacaacttggatccatttcaatatcggcagttgtttgattaggttctgtgtattcataatgagcgattccattttcatattgaatatcccatgcgtatttttgtcccataacactcatatccgcagatcccgacattttgatactggataagtcacttgcagaataattggatacatccatatttgaagtaacggtgactttcgtttttgtctttgcacttcctttagaaatactcatatttgcagtcatcgttaaatcttctgtccagcttcctgaagaagtagtcacttgaatcgcttcctgatatgctcggtatgctttgttttcctttgcatatgcatttactggaaaagcactcatacacataatcagagctaaaacaaaacttataattctcttactcatgttctttctccctctaaagactaagggaattccacggtgtactgtggaaccccctcgtaattcaaagccgctaccccggcattccttatttttcagcagtatttcagaatataccacccatactttccaagtccagataccaagaacgatcaactttaattaatgatatatccagtgagttgctggtttccgtttcttctgccttaactgtaagttcaacctctacggttttagcagcagacaccttaatatcgatatcctcgtaatcgtctttcaaatcatctaactcatcgccagttacatcttcaacgttcaggattttatgggaaacagtccatccctcacccaagtatccttcgatataatccagttgatcctgtaactcttcattgccctcctcgatgaattcatcaagttcatcctcgtcatacccttcttcttccaacgcataggcaatcattttttcaggaatcaattcaaagatagcttcggcatcagcatcaaactgagcattgacaaatttctctatggttgccttataacttctgcctccaaaaagagtaaaaataagtgcaattacaatgacagcaatcacaccaacagcaagcattccaactttgcggtttttatcattcaaatttaccacaacaggtgtgctgttcctgatcatttgccctccattaagttttgcaccgcattcggtacaaaatgttgcatcatcagcgttcttcgcgccacactttccacaaaacattttccatcctcccctttattcgtttgtgttttcaatttttgtaccgcaataattacagaataaatttcccttttctacaattgcatgacaggcgggacattgacaactttcttccgggcttttcgttatggtttctgcacgttttacttttgtgccacaagaattacaaaatgccgcattaagtggtacatcagcaccacagtgttcacacttcaccacacccttaatctgtttgattttttcacggttagacaaaatctcagaatacaaagagttaacttctgcaattttatcccgttcttctgctgtttcatcatttttatgtccttcatagtacaactgtcctatcagcaaaaataactgcgaaattttcttctccttttcagaaattgcagtgttcagtttggttacatcagcaaggtcttttgtttgctgtgctacattttgccctgcatcagtcaagcgttttcctatttgctcaaaaaatgccattacacttcctcctccatctcattttagaaaagtgtacttttgcaaagtgttaaaatccttttttcgcaatgccttttttcgtcaaaaaacgagtgaaaatcttgaaaataaagtttgtatgctgtataatacttctaacacagaaaagtgtcctgaatttgtaaaagtacaccattacgaattcaggacattatttgtttcatccacattttcaaattttctcgctttcccatagaatgttccaactggcatattacaggcgtttgccgcttgttttagcgtgattttctttgccctccaatccttgtgcacctcatgaaaattgtccggtaatggcaatggtggtctgccaaaccttatccccttggcttttgcggctgcaattccctctgcctgacgctggcgaatgtttcttcgctcgttctctgccacaaaagaaagtacctgtaaaacaatatcacttaagaatgttcccatcaggtcttttccgcgccgtgtatccaaaagtggcatatccagcaccacaatgtcaatgcctttttctttggtcagtactcgccattgctctaaaatctcctcatagtttcgccccaggcgatcaatgcttttgatgtagagcaaatcgtccttttttaattttcgaagcagccttttatactttgggcgattaaagtctttgccggattgcttgtccaaataaatattcttttcagaaattcccacttccttcaatgcgataagctggcggtcttcattctgacctcggctgcttacccggatatatccatacacatttcccatgattccctcctttcctatcggaactggaaaggacgttcccaatcccaacattttgactattttggctgtgccagtatattctatcgtaaggaaaacgttacggtcagaatataaatgcagctcgcttcgcccacgctctgatgtactcgcatgattattcattcgtcaaatgtctgctcgtgcaagcacagcagccactttcctcattgctcgcgcaaaaaagcaccaaccactttcgtgactgatgcctaataatattcttgtatgaaaaatgatagaaatcacttcttgataagtttcaaatttacacctcttcgatcggcaattcccctgaaaatctcagttgcgtatgcagatctttcctttattgtcctggctgataactcctcattagaatgcagctgccccagattatactgttacattcaaactgtaattttgcaattcaatatctacacaataagcttcatcaatcaaaatataattacacccatattttttacacatctcaaaatgatgtgcattttcttcgagtacgaattcttttgtacaccacgaatcatcaagacggttttccacagcattggcatattctttaatttgattaaaattgctgttaatataggtttctgacataacaagattttgactgttttctatcgccgtcttaatcatttctctgataattggccaaaggtattctccgagttccacatcatcctctggtgtcaagtttgtatttccacttctgataagtcccatttttaaatgatcgatagaaaaatacggaattttatatttctctaacattttttgtgccagtacagttttccctgtgtgtgaagctcctgctattaaaatgatcattttttatcctcgcaaattcttatttgataaaaacaattataccagttaactcctttcccgtcattacaaaatcacatctccgattgggatacttcctacacaattcgtatcatgtcatcatataacacatgaaactttgtcataacgttaatctttttatggtaatgtccacaataccaatcttgaaacaataaaccattatccattaacttatcaaaatacatggtgagtttatccggcatatacaattcacttgaaaaaacagctgcaattgactgcggtaaacaatgcgtaattacataatcgactttaaaatcattccttttgagtgtttcaaaaccaaatctcatttcttcatcgcttggcatttcttgttcccaccaggatatgccttttatcctaaacattttttctgattttctccaacgtctgcacatatcgaaaaatgtattgtcactattaaagtcattcctgtctaaaatgccatctttaatatcatgtgaacttgcgccgccaaatgcaaagatttttttaccacatagctcaaaaatataccctctcataagatgataaatattatctcttatttgatgcgcttttcctccataaaaatcaacagccggaaattccgtatataatctggcaaaattttcatgattgccatctacaaataatgttgtaaatggcttgttatttaaccactccagccaatatctttcttctttgtcatcataccaaataccaccaaaatcgccacatacaatcacaaaatcatcatgggttaactctttttgctctggaaacaaatctgtattaaacttgtgaaagtctgcatggcagtctcctgttatataaatctttcccatataatcttcaaactccatttacaatcttatctagtttaagatattatcaccggtttctttaatcattgcaatcacacttgtttcccctattcatcaaaagtgatttttcacaaaatggacgaaaccatttctacgacttccgcgataaatcatctcacatctcttgaaatcttttattgttttctatcaattcttctattgtcaccggctcataattattaatcatacagcctgcattcaatgcacgctctcttgttttcatgaattcatagacatcactcctatcgtcatgaatatgtccatagacatgataagaacctctgtgtattgcattccaggtagctaatgggaagtgacacacaattacattgtagtctcgatcctttatgtgctgtaatcgctcaacgctttcaaaatattttaatgcagatgcgctctcaaccgttgccttatcatgatttccgataattaaatgctttctccctttcagctgcttcaaataaaatgacggctccttatccgaacgataacaaaaatctccaagaatccaaacatcgtcctcttctgttacttttgcattccagttcgcaataaggctttcattcatttcttctacactggcaaaaggcctggcatcaaatttcaacacattcttatgacccaaatgcatatctgaaatgtagtaattcatcaaaccaccttccttatatcatgtatgtactgcagccacttttccgtggacttatctgccgtcgtttcgttttcttcaaaaaattcctcgatacggtcaaaatctcgatgtgtatctcctgttatgtaaaaacacatttacacatcatctccctccacataaaactctttcctatcatccaaacgtaaacaccccagtcttccgcccggaaacaggccattacacaatgattgcctgccagcagctcgtcctcaacagatgagattactttacgtccttcttttttcttccatatttgttccttttcgatcttttgctgcactatttctcttattttaacattttccccaaataatcacaatccgaacttcaaaacagggaacctcccgctttcgccaaagattccctgtctcacttttccatattatttcatcgataatttccccagaaattcctgcattcttccatgttctgatgcaaaaacttcctccggcgttccttccaccgcaataacccctttatccataaaaatgattttatcggcaacgttccgcgcgaaattcatttcatgcgtcacgattaccatggtcatatgctctgccgccagatccttgattacttttaaaatctcccccgtcagttccggatccagtgctgaggttggttcatcaaaaaacaacatcttcggtctcattgccagtgcccgtgcgatcgatacacgctgctgctgccctccggagagctgataaggatatgcatctgccttatccgcaagtcccatcttagccagaagtttttttgcctcttcataaacctcttctttgtctctcttttgtacccggatcggggcatctgtaatatttttcataacagaaaaatgcggaaacaaattgaaattctggaataccagaccaaaacaggactgaatttctttcaattcctgttttttcggaaaggttggtcttccattttctacccatgccgccttcttcccaagatacagaatttccccatcatcaatggtttccagcatcgttgcacagcgaagcagcgtagatttgccggaaccggacggtccgatgatcgccaaaatttccccctgctctacagaaagtgaaatgtccttgataacttgtgtgcccccaaattcttttttgatatgtttcatttccaaaagactcattctggaaacctcctaatgataatagttcaactttttttcaaacagttccatcacccatgcaactgcataattaaaaatataatagaagacaccggcaataaagaacggaacgaccgttgtctgtgccgctgcaatctgtttcgccaccgcaaacatctcaatataagacaatgaatacaccagagatgtatcttttactaatgtaatgacttcattggtcacagatggaagtacgttctttaccatctgcggcagcacgatcctgaaaaaagtctgttgtctggaatatccaagaagcgctgcagcctcatactgtcctttcggaatggattcaattccggaacgatagatttctgcaaaatatgccgcataattcaaagaacatcccagaaggattgcagtcagtttatatcctccaatattcatctgccacagataaaacggtgcaaaataccacaccagaagctgcagcatcaatggggtcccccgcatgatcgagatataaattttcacgatccagctgattggtttgatccggcttactcttccaaaatagacgaccattcccagaggcagggaaaaaatcagcgtcataaagaagatcagacaagtctgtccaaaccccgctgtcatttgtctcaacattacctcaaaactcatgtttcttcctccaacataagaataccccctgaaaagaatgcctctttcaaaggatattccttcttttttattttagagtcaccatatcggctatctcatatttttcagcaagttttgcaaccgtgccatcttctgtcagtttttccagatcagcattgaccacatcacacaactcctggttgcctttcttaaatccgatcgcatactgctctgtattcaaagtttgtgacaagatctgatatccttcccctctggatttgatctgataattggcaactcctatatcaattgcaagtgcatccagagcgcctgcctgaagctccgtaaatgcagtattataatctgcaaattcattcaatgccccaaaagtatctgccagagccttctggccgccctcttcttcactctgcagaagatccagtgccgcgctcgccgcctgtacgccaacggtctttcctgccaggtcttccagtgtttcaatacccgaattttctgccacaacaatgacctgactgttatctacatacggagtagaaaatgtatagtcatcttctcttccattcatagtaaatccattccaaatacaatcaatagatccggaattcagttccatatctttcgaatcccagttgatgggctttttcaccagctcccaaccttccaattcacagaccgcctctgccagctccagatcaaatcccgtatattccccattctcgtccatgtatccgtatggtggatattctgcatcaaatccaactgtaaatgtcttcttgtcttctacactctcagatgcctttacatttttttcagaattgttttctttgtctccacatcctccaagcaccattgttgtcattgccattcccgccaaaagcagcgccagtttctttttcatacgtttcatcctccctgtttacatcattatgctaatgattgaccactttactatgctaaatcaaactgtttcttcatggtaacatatattccattccttgtcaatgttttatcccagtaaccttgacagaaaatcccacaaatagtatcatttacttatgtctatgaaagagaggattttgtaaaatgtcaaacaatcacgaagaacaaatccgaatcgtgcaggagacagttgccggaaaagagatcacatttgctcatgtaatgggtggtccggcgccgatcgtatatcaaaaactgggactgaatccacaggttgattaccgctcttctgccatcggaattatgaatatgacaccaccggaatctgcagtgatcgcatccgatattgccgtaaagagcggaaatatttatcttggttttgcagaccgtttcacaggaacgctgattatcacgggagagatttcagatgtcatgtctgccctgacagaggtcgtgacctttttcagagattctctgggatatgttgtatgtgatattacaaagagataggaagtgtgggcatgaatcgtataaccaaagaagaacttcttgagaagattttcaacgatgactatgaacatctaaaaggaaaaaaactgcgcatgacgcgtgtgcgtgtccctggaaaagaagtttgtcttgcacatattatcaatacttcgcagactcccgtttatcagaatctgggattacatatcggtgtacacgaaggagaagatcacactggagaatcaatcggtctgattcgtttcaccccgtgggaagcagttgttgtagctgcagatgtggcaatgaaaagtgcagatgttgagattggatttatggatcgcttctgtggctctttgattttaaccggaggtttgtcccaggtacagactgccgttgaagaagtggttcggttttttgatgaagagttgggatttcgcacttgtgaaatccacaaaaactaaacggaccggagataggatgatatgaagaaattatttttaatgggaagaagtgaagcaggaaaaacttctctgacacaagcattaaaaggagaagaccttcactacgaaaaaacgcaatatacgatcacagatgatgacacgatcgactcccccggagagtatgcggaatccaaacactttggtgttggacttgcatgcttttcttttgaggcagatgtagttgcaattgttcaggcagcagatgaaccctacaatctgttcagtccgtgccttcgcacatttatcctgcgcccgctgatcggcattattaccaagacagattctccccatgccaacatccctatgatcaggcagtggcttttaaatgcaggatgtgaccgcattttcctgatcaataatgtaacaagggaaggcattgacgaactgatggagtatctcgcagaagacccgataaaaatcaccatggagcaggcaaaattcaaacaatatttagggcttaatgaatgggaccccctgccggaaggtgtagaatatccagatggaatttaaaaatgatcaaaaaacgagacgtatttttcacgtctcgcttttattttctacaacgactctcctattcatctcccagaccccgcagccttctgtaatagaatcgcacttttccaatcagccaggtcagatatcgcagcactggctctgtcgcaattgcaaacacgacaaacaacatgatacattttgttgtcattcccgtaatcgcaaataaatcatttaaaaagatgctgcaaaacagaagccctgctatacatccaccaagaatgacgctgcgcagcacattcatcggtgcactgatatgatacagaatcataaacccaacgatcgccaggagcatagttgctgctgtcgaaatatctttagagtccactccaaatgtccgtccaaataccacaagtgctcccactgcaagcacatccgtcagagccgcaggcagcgcttttaaaaagacatttgtcaggaagtgtcctttgataatattcttattcggctccagtgccaaaaagaatgccggcactccgatcgtaaacatactgatcagtgaaatctgtgacggttccagcggataagtaaacataaacacaaaagataccagtgacaacagaaatgaaaaaatattttttacgaggaacaagctggctgagcgctgaatattattgaccactcttcgcccctctaataccacttccggcatacaggagaaatccgactccagtaagaccagttgagatgcctgcgctgctgcatcacttccagatgccatagcaatactgcagtccgcatcctttaatgccagcacatcattgaccccatcccccgtcatggcaaccgtttttccttcttctttcaaaatctggacaaatttccgcttctgattgggggtaacgcgcccaaatactgtatgattcaaaacagccctccgcatctcttcttctgtctgaaggcctgatgcatctacatatcgttctgctcctttgatgccggcctgctttgccacttctgaaactgtcagcggattatctccggaaattacttttacctccactccctgttccgcaaaatatgtaaatgtttctttcgcttcctgacggatcggatttgccaaaagtacataagcaagcggagtcactgcttcctgcaaaggctttccgtctggttcttcctttgctgttccaaacaccagaactctggcccctttcgatgcatgttcgcgaattgctttttcatatatttcatactgctcttttaatacaaattccggcgcccccaacacataggaaccctcttcaaatgtgacactgctgtatttggaagcagaagaaaatccggtttttgccatcactttcttgccagacgctgttttgaaatgccgcttcattgcctccattgtgatattgtcgctgctctgtgccgctgtaaaatctcccagaagttcagaaagcggctgcatttcatcttccctgtattctgcagttggaatcaccccctggacttccatcgtattctctgtgatcgttccggtcttatccacacacagcacattcacacgggcaagtgtctcgatgcacttcatgtcatgcagcagaacttttttctgtgccagacgaatcgaactgactgcaagcgccacactggcgagcaagtacaatccttccggaatcatcccgatcactgcagcaatcatagatgtaacactggaacggaatccctccccctgaaacacaaaggcctgaagaaacaagattattcctatgggaatgatcgcaactccaacccatttgaccaacttgtcaagggagcgaatcatctccgactgttccgtattctgcatcgcttttgcttccagcgtcagccgggagatataggaatctgcacctaccttatccaatcttgcataacactgaccggatacaataaaacttccggacatcagctgatctccgtttcgctttatgatctcatcagattctccggtcagaagggactcgttaacctgcacttcacctgcgcagacttctgcatccgcacacacctgattgcctgctgaaaacaccacgatatcatccaccaccaaatcttctgcattgatctggcctttctttccatctctgataacgactgcatgaggtgcattgagcattgtcagatcatccagcaccttttttgcccgcacctcctggatgattccgatcaatgtatttaacaggatcactggcaaaaaagtcaagtcccgaaaagaacccaccatgcagagcaaaattgccagcaccagaaaaatcaagttaaaataggtaaatacattttcatggatgatttcctttgttgtcttggatggtggatccaccggtttattggtccaaccgtgcattcggtgctcctgcacttgctgcatcgtcaggccggtatgataatctggccggtatctggtcgttggaatcctcttttcctgaggaatctccatggtctgcgtcttatctgtattgtgttttgttcttctttctctgtgctgcttctgccgcattcttctcgcttccttccatatgtccaatcctgatggattttttctctgtatataatttctttcattttaacacactgattttgtttttccagtaaattcccaaaaactttagaaattcttcaaaaacttgtattcacatcaattaataggagttcggacaaaactctcttggaaaacaagaaaatcacacagattccttgtcttctttctccatttcccttataataatacaagtatttcaaagaaaaggatgatagtggattacaatgaaattaagaagcagacttgcaattacatgtgcaaaagggacaagtaccctgattaaaaaattaaatcgcggaagtggcgttacccttcccggatatgtggcaagattgatcgacccgaagattttaagcgtcatggcttctcagatccgagagaagacgattgttaccatgggaaccaatggcaagacaacgaccaatgccattttatacaaagcactggaaacagaagggaaaaaagtcatcatcaaccgaaccggagccaatatgctcaacgggatcatttccgcatttgttcttgcaaccgacaggcatggacaactggatgcggactatgcctgtattgaggtcgatgaaatcgcatccgtaggagttctcccacagttaaaaccagactgcgcacttttgacgaacatttccagagatcagctggaccgttttggagaagtcgatattacatttgacaaattaaaaacagcaatcaccagtgtaccggataccacactgatcatcaactgtgatgatatcctctcgtattctctggccgaaacaagcggcaatcggtttgtaacatacgggatcagcgaacaaatttttgatgatatctcccgttcagaaatccgagagagtatcttctgccgcaaatgcggaaagaaactggaatatgattttttccattatggacagcttggaatttatcactgcccaaattgcggatggaaacggccggcacctgatttcacagctacacagatcacactcaacgaagaactctatgcgttcgatatgggagatctgcacctggattccacagttcggacaccttacaatatttacaacacccttgctgcttatacagcattgcataccatgcatgcgccaatggttcattttaaagaaatggcagagtcatttgactatggaaacaaccgggaagagatcctgatgatcaacggtgcaagagtccagcttcacctttccaagaatccgattggattccaacagaagatttctcttgtattaaaggatccgaaaccaaaagatatcattattcagatcaacgatacctatcaggatggagaagacgtctcctggctgtgggatgtagattttcagtatttggcagacagccatgctgctacgattactacatgtggaacccgcaagcacgacatgggacttcgtctcaaatatgaagacatcgattgtacctctgccgatgatatgcgttcccgtgtgacagaactgacagagagcggaacaaaaaatctctatatcatcgtaaactactccggcctttatcgcacgaacagaatgctgaaagaactggcacaaaacacaatggaacagaaaggagaatcagcatgaaactgacgattggacatttatatccggatctgttaaatctctacggtgaccgtggaaatattcagtgtttccgaaagcgtctggaatggcgtgggatcgaagctgaagtcattcccgtactttcaggagatactattgacttttccaaactggatatcgtacttctcggcggtggttctgacagagaacaagaacttgtctgcggatatttaaaggagattcagaacgacttcaaagaatatgtagaaaatggtggcgttgttctcgctgtctgcggtggttatcagctgcttggaaaatactataaaacagaaaaaaaagtcatcgaaggacttggcattctggatattacaactgagtgggagcctgaacgtctcattcgtaatatcattttgaacagcccgctctttgacactcctgttgtaggatttgagaatcacgggggacgcacttatattggaaatcatactccatttggaaaagtattctttgggcttggcaataccggaaaatccggttatgaaggggttgtatacaaaaatgtaattgctacctacctgcatggtcctctccttccaaagaacccccaagtctgtgattatctgttagaacgggcactgaagcgcaaatacggtgaagaagtaacccttgctccactttccgatgatctggagaagaaggcaaacagctatatcgtagaccgctacagcgacaaaaaatatgtgttaaaagagacaatcaaacgtcacacttaaaagtggcaacaaaaaacccgctggttcattccagcggatttttttattgtctgtttatttctttttaaacatcagcttgatttttttcatcagctggatcaccggaagatttaccagtgccaaaccatatacaatcagcagctgcgtaaatgtcagtgtctgcactttgaatactccatgcaaagcgggaaccgtcataacacaggtgatcagtaccagaccaagcaggaatgctccgatcagataaatattattccagagtctcttggagaaaatcaccgggtaatctgctttacagttgaatccatgcaccagtcgtgcggtacacagtgttccaaatgccatggtgctggcaagtactgcgtttccaccttctcctgtcagaccgatcataaatccaatcatagttgtgatgccgatacaaagcccttctgttccaatttttgtcagaaaatcttttgtcaggatagattcgttcatcggtcttggcttctcatccatcacccttttcgaatgtggttccagtccaagtgcaatggccggaagactgtctgtcaaaagattgataaacagcaggtggaccggtgcgaacggaaccggaagtcctgcgattgacgcatacaaaactgcaaggattgctccaaagttaccggaaagtaagaactgaattgagttcttaatattctgataaacatttcttccgttctctactgcttttacgatcgttgcaaagttgtcgtctgtcaataccatagatgcagcatctttggatacttcgcttcctgtaatacccattgcaactccgatatctgcctgtttgagcgccggtgcgtcattgacaccgtcacctgtcatagctacaatatttcctttttcctgccatgcgcgtacaatacggatcttatgctccggtgatacacgggcatagacagagataccctctacaaaatctttgagttcttcatctgacatcgaatcaatcacagcaccttcacatgcttcggattcatcattcaaaattccaattctctttgcaattgccgcagctgtcactttatgatctcccgtgatcataattggacggatacccgctctcttacattctgcaactgctgccatagactcttctcttggcggatccatcattgcaatcagaccaaggaatgtcagatcattttcatcttccagagacaattcttcctctgcagataccgctttatacgcaaatccaagcacgcgaagtccttgtcttgaaaaactctgattctgagcttcgattttttctttatcctctttcgtgatagtacgcacttcattcccaaattgaatacttgctgcacgtcccatcagtacatctaccgcaccttttactaccataatcggtgtttcatcaatggtatgttttgtagacatcagttttctgtcactgtcaaaaggattctcactctcacgtggatattctcctcggattttctgaatatccaggcctaatttacttccaaggttaatcagggcagtctctgttggatctccaatctcgacaccgtccacattcgtagagtcattgcataaaatactgaaatacatcagtttttcttgttccgaatctttgagatcaatctgatctgccggaatcacagtttcattcacatagtactgctcaacggtcattttattctgtgtcagcgttcctgtcttatcagaacagataatagaaacacttcccagtccttccactgcctgcagcttacgaatgatcgcatgttcttttgccattttctgtgtaccaaaagaaagtacgattgttacaatggaactcagtgcctccggaattgctgcaactgcaagcgcaactgcaaacaggaaggcatccccgatgtttcctccacggaatacattgattccaaataaaataccacaaaataccagaatgatgatggaaagcttctgtccaaactgatccaggttgatttgcaatggtgtcttcttttcagacgtcgtctttaacagacttgcgatcttacctacttctgttcccatcccaatgtctgttaccacaaaagatcctcttccgtatgtgacaaaacttccggaatataccatattcgtacgatctccaagcggaacctcaccagcaattgcatctgtcatcttctctacgccgagactttctcctgtcagcgcgctctcatctaccttcaggctggcactttctaacaaacggccatctgccgggatatagtctcctgcatccaacatcacaatatctccaacagtaacttccgaagatggaaccgggatcacacttccatcacgaagtacctttgcttctggtccggaaagctttttcagactggccagggactgctccgccttcaccgtctgaacagtaccaagaattgcattgatcgtgatcacgatcaagatcacgatcgcactctctgcatctcctaaaaatccagatacgattgctgcagcgatcaaaataatcacaaggaaatctttgtactgctccagaaaaatctgaagcgtcgttttcttctttccttccaccagttcgtttggtccgaatttttcctgatgtgcttttacttctgcagatgtcagtgggtcttgttttccattgatatcctgtttaacttcttctgcggaaagctgataatagtttttcacatgaattcctcctttttctttcatgcaataaaaaagagacttttattgcacgttatgtatgcaacaaaagtctcaccatttaatcacgatacggatggacttctccatcgtactgacgacatcgtgcacgccataagcgctggttactcccttttatttaagaaaactataatgcattttccccttattgtcaacgataatttgctttcttctcgtcattttcttaacatgcttaaactacattcccagcttttccttgattttccgtgcttctggcgtattggcaactccaccttctcccgtctctcttaaggaaacatgcatactttctccaacctctttcatagcatcgatcacctgatccggcggaatcctgctggtgatcccggccagtgccatatccgcagatgacagcgcattcaccgctccgatcacatttcgcttaacacacgggacctccacaagtcctgccaccgggtcgcacaccagtcccagtagatttttcagtgccatcgctgctccatgcataatctgactgacatttccaccctgtaaagacacaagcgaacctgaggccatggcagatgcggctccaatctctgcctgacatccacctgctgccccggcaataaatgcacgagatgcgatcacctgtccaattccggctgctgtatacaatgcatgaacaatttcttcctcagacgccttgttctcctcatacagaggaaccaaaactgccggaagtactccacaagcacctgccgtcggtgctgctacgatccgcttcatacaagcattggattctcccatttccaatgcccttgcaatcacttttgaaacaaacggaccgcaaagcggctcctgatcttgtcgataggattccatctgcgtgcccatctgtcctacaagaccactggctgaaatctgctttttatcatattgttcacttgctgatttcattgcctcccacatctgctgcatggccgcaactgactctgcttccgtcacggaacgatcagacatatcctccagaagtactgctctccaaaaagggatctctttttcctgacaaactacttgaatttcttccaatgaatgaaacgccatcttctatactccctccgtctcaatataagttacttttttaattcccgtcaatccttccagatatcgaatggtgtctgtctcaactggctgatctgtttcaatcaccatcactgcatatcctccccgcttatctcgatgaagctgtagtgtggctatattcactttctttccatataagacagccgttacttctgctacttgccccggactgtcttcatttcgaatgatcaatgtcgggcaggctcccgtacaattcacggtaatcccatccaattcattgagcatgatccgccctcccccaagcgaagatgcctgtacctggatcgttcttccatcagacgcttcgacatccagaagcgctgtattgggatgtgcttctttgatctgtgtgttatatatttcaaactccatcccttcctcttctgcaactgaaaaactctccgggatccgcatatcatctggcttcattcccaacaatccggctaccagtgcacgatctgttccatgccctcttccagtcgctgcaaaagaaccgctgagaccaatccgtgcttttttcggacaacttcccagtaatttccttgtgatataaccgattcttgcagcacctgctgtatgggaactggatggtccaaccatgaccggcccgagaatatcaaatatattcatctttcgttctccttctcttcttctctgctactgtagtataacaagttttgattaaaatatccattcctatctgaaagcatactgcacaatcttccacactctgtgatcacatacgattttcttcgtccttcttcttttgctcccgtgatttcagaaatcatttcaaaaattcaccggcaaacaatgccagcgcatttgcattctcactgtttccaattccatgaacctctacaaagtcttccgcccttctcgcatcttcatgtgtaaaccgatatacttttccacttgtcttcttccaggtatcttcaataagtttccgatactcctcttcctgataccattttgaatcgacacaaagaccgccatttttattatattccgctttttctgcctcagtcagagattcggtttctgtctcctgattcaagcgataatatgtttcattgataaagcgtacactttgtttttccggcactttcggaacctctccgtctttaacaacatacacaagaaacggcacgattgtctcttttcctttctgatccggtcccatactgtcctgaacatgccagtttaacatcacatatccggaattggtaaaggcctgaaattcttctggatgaaaatcgagaagtttcaatttttttgaaagattcccttcttctaaatcctcagcttttaattttccttctgtgacagcctgctcctttaatacaaattccgtaattttcccgtttcttgcttcctcaagcgtaaaatagcggtcttgagcttcaatcacaggaaattcattgtatttcactgcaacatgacaggttttttctgttacatttccaatactgtccacaacctgatacgtgactttatgcgtaaccgggctgtcttttttatccaactgcaaaaaccaggtatccaaaatatcctcctctgtcattccatctttccaggtttggacacttcgatctgcctttccattttccatcacctttccaggagcatactcgatctgaattaccttcacctgctcgactaaatctccatcttccggatccgtactttcgatatgctgtaataaatgttcccgttttacagtttctccttcaaagtattctttatctggcgctgagatttcaggtgcccgatcccagattgcataaaacgacacctttgccatttctttgttgtcttcagactctgttttctgactgacagcaatttttcgaagttcttcataggaaatcttattttcttgtttctcctgaaatgcagcttcttttgcccctgtctctgcacgatgatcccatccggcaaacgtatgtctgtctcgtctgtaatctgtatacccctgatttttgtgaacgtcatatccacttttcagacagtccgcatatgagatcgtttctgactttttcgttcctgcttctgcatgatttcccagataccggatcaagacccgatcttcccagactgcatacaatataagatcctgattcttctctgccggcaggttctctcccgcctgatattgaccttctttcactgatgggttttcgttccatccaaggaatggtacatccagccattcaggaacctgttcggatactccggctttctcataccaatatttaactgaagattctggcatattttccacctgtgcttttgtatttttatcataccggatcgtatatttgctgctgattacgactgcttcttttaaagttcctgagcgtctgtcctgataatcccctggacgcagacaatatcctccttgtggtgtcagacaaaaatggttccaaaccgtactgcccaggcgatttccatagctcatttttactgtcattctgccattcttatattgatccggtgtgactctcgcagcaagagcagactgcagacttcctgtcacttcaatatatttttccgagggaaggtagacatcatttccttcctccacaagtgccgcaccgctcatccgaaaaactccattttgatagacaccagcccctctttcccctgtattggctgaaatccggcctccttcctggcacaaaattccgttctgatttaaaactccgccaccttgtctttccgcataattgccatacaacattccgtctttcaaatgaaattcgccattttttaaataaacagcacctccctgatctgcctgattgtctcggattgtcccactgttccatataacaatccctccatcaataaaaatacctcccccgtttcctttctgcccgcactgattcgaattggattcctgtgcatgattgcctgcaacggttgtatcgcttattgttgtctttcctttgctcatcgtggcaattccatgtactccattctcataatcacatccatttacagaaagggatacatttgaattgcatagtcctgtactgaaccatccggcatacaaatcacccacattcggattctgtgcactgcttttccatccatgatacacttcatttgttatcgtaacctgaaatgcatctgactcaaacgaaggaccttgtgagaaattttctcccacatagcaattctgaaatttattttcccggatcagcgatcttatttgcccggaatacggtgctttttcatctcgtatgccactgattccaattctgcagttctgaaatgtgttctccaaaatttccgaatggatatctgcaccaaacactgaaaaatggattcccccttcctctgaaatattctcaaacactgaattttccactcgtaaatggattcccaccgatgaaaatcctgtactcgcattggaaatcacccctatcccgctggcgcaatttacaaatctgcattgctctaccgtaacagaaccatactccccatgcaccatccagcgcttcatgtcatatccattctggaagatacagttttcaaatacaagagaactccctttatttgcacagattgctccgcagtacatattgtccgtatcagaaacagaagtttgactcagatcaaacgtcaatgtatctgtgtctttgcttccaatgaaaacctttgacctttcaaatgcaaggcggtttctatttggcatactgattgtacgtgctccaccttccggaagaattttcacattctgaaacacttttgcccgtgctttctctacacttacaaaactgtcttgcaatgcatgatcctgtacaacgtatattgtttcattgtccctgactgccgccaaggcttcagacaaatctgcataatagacatttccaattcggcaggctcctgccggacttttttcttggttgattttctcttttgcaccttttttctccccgacctttaaaaccgatatgtcttctgcctcgcctgctttttgaatttctttgagacgttctttcacgaaaaaagatgcttttgtctgtaaatattcttcatattgtttcagatgatcaacctttctttgttccccctcccacagatacgtctccccatactccgggagaagtgttatcacatctttttctagctgctctgcttcctcctctataccatttttgttttctcgacgattccattcccgaacaacttccaaatacccctcatttttccagggagcatcctctctttgtatctgttctttgactatcaaataaggcaagatctgtcgcagctgataaagctctttttccgaaagtgctctgacaaattccaaacgatcttctctctccgaaaaagatgtatacggtttttccaaagtaatgatctctgacagactgttttcttcttcctgtattttttcctcccatccggtatctgactcttcggcagcccatacctgtacactgccaaacaacaggaaaaatacagtgaaacctgccgtcagatatttccgattctttcttcttatattcgcacctccatcttcttttctattgccatcagacaatgaccggcggatcgcgaatgccgtccgcatcttccatctcctccctcctttcgggtacaaaaacatttcgggtacaaaaacaaagccgatttctccgcctcacccatacttattgaattaaaactggaataaatttttctgatgtgatggttccatcacgttgaagtatataaacgatgaatctgtatattcagattccatgaatataaagacctcagaaaccagatctgtttctaagtgatatgaattataacacccaccccgaaaaaaagcaagatgtcaaatgctctctgtcaaaaaaatgagcagacacattcagcgcctgctcatccatctgttttttgttttagagattagtttttattgttgtcagtttctatgctgtttacacgattccctgtgctgtcatcgcatcgacaactttctcgaatcctgcaatattcgcacccactacataattgccttttgcattgtatctttctgcagcatctgccatgttatggcagatatttaccatgatctgctgtaattttccgtctacttcttcaaatgtccaactcagacgctcactgttctgagacatctccagtgcggatgtcgcaactccaccggcattggctgccttacctggtgcgaacagaactccgttttcctgcagatattccgtagcttccattgtggtaggcatatttgccccctctgcaactgcgatacacccgtttgcaaccagtgctttcgcatcatccagaagaagttcattctgtgttgcacatggaagcgcgatatctacttttacgctccatacgcctcttccttcatggtactctgcgtttggacgataatttttatattcggtaagtcttgcacgttttacttctttgatctctttgagtgctgccagatcgattccttccggatcatatacccatcctgttgaatcgctgactgtcacaacttttgctccgagctgctgtgctttctctgtcgcatagattgcaacatttccggaaccggaaacagcaactgtctttccggccagttccattccgtttaatttcagcatttcctgtgtcagataaagaagtccatatcctgttgcttcttttcttgcaagagatccaccataagaaagtccctttcctgtcagaaccccttcgtatactccgcggattctcttatactggccgaacatatatccaatctctcttgcacctgtaccgatatctcctgccggaacatctgtatcagcgccgatatatttgcataattctgtcataaaactctggcagaatgccatgatctctctgtctgattttccttttggatcaaaatcagaaccaccttttcctccaccgatcggaagtcctgtcagagagttcttgaaaatctgctcaaaaccaaggaacttgataattccaagatttacagaaggatgaagtctcagaccgcccttgtatggtccgattgcactgttgaactgtacacggtatcctgtattcacatgcacctgtccgttgtcatctacccacggcacacggaatttaaactgtctttccggttcaaccagtctttccagaagtgcatctttgcggaacttttcctcattcgcttctactaccactcgcagggattccaacacttctttgactgcctggtgaaattccggctctgcaggatttttctttaccactaaatcaattacttcatcaacgtatgacatcattattacctcctgaaaatagaaatacccgaacagacaaattgcatccgggttttaacagacatcttgtccaattcatatattatagtgatattttctgattgtcaagaatttcttgcatcaaatttcaatgttttaatgctttgccttgataaagtttttgaatttttcaatttaaaatcctgcattttgcttctttattatataattcgtatactcataatctcccctgcatgaacaactgcctctgcaatttttccatttaatctgaaaaccacttcttcatctactgcagattcatttaaaatgaccacactcaatgtcccgtccggatttttaaacgctgtcacatccagattctgcgtgtatttgctgaatccaatccgtacagcaccaggtcggatataatggctaaaatgccagatataacacagtgtatttctttccatcagttttttattctctgtatcatacagatagggagcatcgcaaaggttttgcacatggtttggcccccctgtttgatccaggagcagattccagtcatagaaagcattcatccctgcattgagatttccgattatatcatgtgcatatttttgcgcattttccaaatagttctctgcactatatttactgtattcaatgcaggcctctgacaaaatcagcttcttatccggaaacttttgatgaatcatttccaacgcttcaaaatgatcgccactataccaatggaaagcgattcctgttatcatgtgatcagtttctgaatctattatctcacacgcacgttcaaaagcccgttccttgttgtgatcccaaacaaaaatttcaagatcatccaatccactttttttcagcgccggatacagaaaatctttcagaaaacatcgctcctctgaagctgtataaatacaggaatcccatgtctgaaccgctgcgggttcgttttgagcagaacatatttccgaaaccaatccagagaaaaacttttcatttctctgtcgttctcatccgacattgcctcgtactgtctaattgaaaaatcacaactgtccagatgaatccttcccatttgataattcatttttgctgtatcaaaatactcggatatccaaaattggcagaacattttcattattcgacacaacatatgtccaaacggctgaaacaaattacagatatgacttttacagaataccttctgtacaaacgaatggaagcagcctcagagtttttgataaaaaccaacatgaaaatcaacgcgatcgtggaaactgttggatatatgaatcaggaacactttatgcgcacttttcgaaaatactacggaatgactccgagcacatatcgcagcactcaccaagagctccataaataataatatttaatacttttataacctttaatttacattaaaaatagagtgtcttacgacactctatccatctgcacatattagttatatttacgttttctagcagcttcagattttttcttacgtcttacgcttggtttttcgtaatgttctcttttacgaatctcctgctggattccagcttttgcgcaatttcttttaaatctgcgtaaagcgctgtctaacgtctcgttttcttttacgattacatttgacatagtctcacacctaacctcccctccagcctggtattgtgcatcatacgactgttcgggtatttttattgcactacaaagaattataacatatttttcaaaaacgtcaactggttttttctatttttttaagaaagttgttctgccagtacttctgccgcttttttcagagcttcctgaattcctgcaggattttttcctcccgcctgagccatgttcggacgaccgccgccaccgccgcctacaaggcctgcaatcgctttgatcagatttcctgcgtgtgctccctgtttcattgcagcttctgtagctgttaccatcaaacttacttttccgtcattaccggatgcaagtacaacaacaccttctccgagtttctctttgagctgatctccaaggtcacgaagtccattcatatccactccgtcaacttctgctgcaagaagtttcacacctttgacttcctgtacctgatccatgacatctcccatggcatcctgcgccagcttgctctttaaactttccacttcactgtgaagtgctttgttctctgctgtcagatgcgcaatcttctcagccagattctctggtgttgccttgagcactttcgctgcctcattcagttttttctccagattgtcataataacggatcaatccctttgatgtcagcgcctcgattcttcttacgcctgctgcaactccggattctgaaagaatcttaaacgccatgatctcatttgtattctttacatgcgttccaccacaaaattcaatggaataatctcccatgttgactacacgtactacatcaccgtatttctcgccaaagagtgcctgcgctccggtctttcttgcctcttcaatcggcatattttcaatatctacaggaagtcctgctgcaatctgctcattgaccatatcctcaactttctgcaattcctctgctgtcattgccgaaaaatgagagaaatcaaaacggagtctgtcttcatttacgctggatcctgcctgctctacatgtgttccaagaaccgttctcaatgctttttgaagcagatgagttgcactgtgatttcttgcagataatgcacgtttttctgtatctacggaaagttctgcctgatctcccgctttgatcattcctttgacaacatatcctacatgtccgatttttccgcctaataattttacagtatcttctactttgaattcaccctctgctgtacagatgattcctgtatctgcttcctgtccgccacttgttgcataaaatggtgtttcttccacaaacacagtacctctctgaccatcagaaagcgcctctactacttctgtatcagatgtcagaaccgtaatcggagatttccatgtcagattttcatatcctacaaaggtacttgtaacacttggatcaatagattcataaactgtcacatctgctcccatgtagtttgtctctcctcttgccgcacgtgctgtctgtctctgcacttccattgctgcatggaatccatcttcatctacctgcattcctttttcttccaggatttcttttgtcaggtcgattgggaatccatatgtgtcatacaatttaaatgcatctgcacctgacaaagttgtggtctgctctgcttccatttttgcagtcatctccgctaaaatgccaagtccctgatcgatcgtcttattaaactgatcctcttcttttgcaataaccttcaaaataaagtctttcttttcttccagttccggatatccatctctggatccttcgatcacagtctgtgccaattccggaataaagctgccttcgattccaagcagtcttccatgacggcatgcacgtcttaacagacggcgaagcacatatccccgtccctcgtttgaaggcatgattccatccgaaatcataaaggtgacagaacgtgtatgatctgtaataacgcggattgaaatatctgcctgtgcatcctttccatactcggttcctgccaaacggcaaatatggtcgcgcagtgctttgagtgtatccacatcaaaaatagaatctacatcctgtacaacagatgccagacgttccagtcccattccggtatcaatattcttttgttccagatcggagtagtttccatgtccgtcattgtcaaactgtgtaaatacgttgttccagatttccatatagcggtcacactcgcatcctactgtacaatccgggcttccacatccgtatttttcacctctgtcgtaataaatctcagaacatggaccacatgggccagaaccgtgctcccagaagttgtcttcctttccaaaacggaaaatacgctctgccggaatccccatctttttgttccagatttcaaatgcctcatcatcctcttcatacacagaaggatacagtctgtcaggatccagacctactacttctgtcaaaaattcccaggaccattcaatggcttcgtttttaaaataatctccaaatgagaagtttccaagcatctcgaaaaaagtgccgtgacgtgcagtttttcctacattctcgatatctcctgtacggatacatttctgacaggttgtcacccggcgtcttggcggaatctcctgtcctgtaaaatatggttttaaaggagccattcctgaattaatcagaagaagactcttatcattgtgcggcaccaaagaaaagctcttcattgccagatgtcctttgctttcaaagaactccaaaaacatttttcttaattggtttactccatatggctgcataccttatcctccggtttcattcgctaatctcacaaaaatgggctgccgcaagacattcgttttgcagcagacccacgtctaatttatcataccacagcttattttttttgtaaatcctattctaactcaatttcttccagctcttttgcaggaatcggggttgttgagtttttaacataagttgctacaccttttttcgctttcagaaccggaatattcgttcccgctccggcaacacatccgccaggacatcccattccttcaatcagacatccgttcagtcttccggcttttgccaatgccagtatctttttacattctgccagaccttctgcatgttcaatatttacttccacatccggataatattcattgatacatttttcgattgcctctgccactccgccggcacatgcatatcctcttcctgctccggttgcatcatggaaggaagattccgcctcatactgtgtcagatcaatatttttcgcatcaaacattgcctgcagctcttcaaatgtaattacaaaatccacatcacttctgacacttcttctggatgcttccagctttttcgcagcacatggcccgataaagacaacctttgcatccgggtgctcttttttgatacttcgcgctgttgccaccataggagtcagttcctgagaaatctgatcgatcagatccggaaagaacttcttggccatcattgcccaggatgggcagcaggatgtcagaagaaacggcagttcccctgtcacaactttctctacataatgatgcgcttcagcgattgctccgatatccgcccccagcgccacttcatgtacgcctttaaatccaagttccagcaaagcagctttgatatttctcgggctgatattgtctccaaactgtcccacaaatgctggggcgatctctgcaatgatctcgctgccttcttcctgcagtgctcttgtaagctggaagatctgggacttatctgaaatcgcgccaaacgggcagcttaccatacacattccacaggatacacatttttctgtatcgatataggcacgtccatacttatcagaaacaattgcgccaacaccacatgcatttttgcacggacgttcttttttggcaatcgcatcatatgggcagactgccttacattttccacacttgatacacttatcctgatcaatgtaagactttccattgaccatggagattgctccctttggacagacctcgctgcatggatgtgcaagacatcccttacacatattgctgacttcgtatttgttctcttcacagctttcgcatgcagacggaatcacctgcatcagcggcggctcatagtatttctccgaaatattgctttcctgcacaccggatgtcaaatgtaccggcttatcctccgggcgcagggaaagccccattgccagacgaagcctttctcttacgatcgcacgggcacgatatgtgctttctctgtattttacagtatcatcattcacgatctcatacggaatcgcttccatatcttccagcagtgtctctgaatttgcctcaaaaccaagttttgccacttcctgaaatacgcgtctgcgaatcgctcttacctgggtatccaggcctctcatattggacatttccgtttcctccttcttgtttctttatttttgcagcagctgctgtgcataatatacagactgcattgcatcttttccataaaaatcagcaccgatcatgtctgcatattcctgattcagcactgcacctcctaccattactttacaccatggtgctttttctttcaactgacggatcgtctcttccatactgacaacggttgtcgtcatcagcgcactcaggccgaccagacggatttcctgtccgattacagtatccacaattttttccggcggtacatcttttcccagatccacaacatcgaaactgtaattttccaataaaaccttcacaatattttttccaatatcatgaatatcgcctttcacggttgcaagtacgatcttttctttctgctcctgccctgcttcgcttttgtccagtccttcctttaaaactgcaaacgcagctttggcagcttctgcactcatcaacagctggggcaaaaaaacagtgcctgtttcaaatccctttcccaccgtatccaatgccggaatcagatgttcattgatcacatccagtggtttatgctcctgcatcaatcccattgtaatctgatgagactcttctttcagtcctttttcaatcgccgatttcaatgtcattgtgcttccacccgccgtctgtccgccctggcctcctgcactgcctggcgctgaagcaaactgcacattcgcattgccatagcgggcaatataattttcacaatttggatccaggttcatcaatgcatgatacgcataatacgagcgcatcatatcttccgatgccggattgatgattcccgcgctgagtccctgaagcattgccatggtataaaagtttgcattgatgatcggtctgcctggaagcccaaacgaaatattggatacgccaagcaccgtattcacacctagttcatagcgaactctgtgcagtgcttccagtgttgttctggctccttccggctctgaactgacggtcattgcaagcacatcgatgaccagatctttcttctcaatgccatatttttccgcttcccggatgattttttttgcaattgctacacggccatctgctgtcgatggaattccctcttcatccagagtcagaccgatcaccacaccgccatatttttgaatcaacggaaatacagcatccatagactcctgttttccactgactgaattcaccatcggttttccattataaatgcgcattgcctgctccattgcctgaatatttaccgtatcgatctgcagagggaggcttgtcacgctctgaagttctgtgatgacttccttcatcatggaaacttcatcaatatctggaagccctacatttacatccagaatatgtgctcccttgtcctgctgcatgattccttctttgagaatataatccagatcatgatctttcagagcctgtttaaactttttctttcccgtcggattgatccgttctccgatgattctggaccctgtcccaagcatcactgcctgcccgtaagaagatatcaccgtataaggcttcttttccaaagctttgaccggaagccctctgcacacatcaatcatcgcctgaatatgcgccggcgttgtaccacaacacccaccgaccacacaagctccggtctgcgtgatctctttcatcgtctttgcaaactgagccggctctacatcataatacgtctcaccatttcgctgttttggcagtcctgcattgggcttcacgatcactggaacggaagtatattttaagatttcctgcaagatcggcatcatctgatccggtcccatcccacagttgatccccagtgcatctacacggagcccttccaaaagtgaaacaacagaaagaacatctgctcctgtgagcagctttcctctctcatcaaaaatggttgttacaaacaccggaagatgtgtgttttcttttgccgcaagcactgccgccttgagttcataagtatcactcattgtttcaatgtggatcaggtctgctccggcttcttctccatagatcatcacttctttgaatgcttcataagctgtttcaaattccagatctcccattggttttaacagcttcccggtcggtccgatatccagagccgtatacacttcccgttcatctttcactccctgctttgccgcctctttgacatgggtgactgctgaaaaaacaatctccttcagcgagcagctatcgtcatgaaatttgagcgcattggctccgaatgtattggtcagtacaatgtcactgcctgcttcaaaataactgcggtgaatctctctgactgcatccggatgtgtcagattccacgtctccggcagctctcccggcaaaagtccctttgcctgaagcaatgtccccatcccaccgtcaaaaaataaaagttcttttcccaagcgttctaaaatcatatcgtatcccttctgtattcacagtccttcttttcgcaactctcacaaccctgcacgggacaccgctctttcagccggctcatcccaatcacagctgtcacggactttgtcggtgtcatcataaaactgtccgtcatggtcagtccaatcgtcttggcacaatccaacatctgcatcagcggcttctgatactgaattgcaaaatctccataccccggactaaatctcggacgaagataccatccttcctgttccagttctgctgatattgcctcctgaacagaatcacaatattcctccagcatagccgctgcacacgattgcaggacaactgcacttgccatatctgtcagtgatgcccgtgtgatcaaacgatccacccctgttccaagagttgctccaaagaggatcagcttctcacatttcttcaagtttcttcccagacttctgctttccatctggatgttgccaatttgaaagcactcctcgctctgatgccgtaagtcaaaaatacggtagatggatttgggacctgccactgattccagactctcaaaagagtctcggatcaaggcaagcgtctggtcatctaccgcatttcttccatagcccagataacggatagcttcttttgttcttctatccatctccagtctcctagcatttgataatttcagagatattgtgcatgatagctgctgccacttccggcttgttcatggaataaatatgaatgttcttcacaccatttgccagcaggtcaataatctgatcggtagcatatgcaattccggcctgttccattgctttcggtgagtctccaaatcgatccagaattgcctgaaatcttcttggaaataccgttccggacaactcacagcttctcttcatctgccttgcacttgtgatcggcatgatgcccggcaatacaggaacggttatccccgcttcacgaatacgatacagaaaattgtaatgaatatcattgtcaaaaaacatctgtgtggtcaggaaatctacgccactgtccaccttttgcttcagatatttgatatcatcttccttatgctcattttccacatgtccttccggatagcatgcagctccaatacaaaaatcaccatgcttgcgaatttcttcaacaagctgatatgcatagtgaaaacgatcttcactcggaaataccattccttctgcaatatccccccgcaatgcaagaatattctcaatcccctgttccttcagattcgcgatcactttacgcacttcgtctttggtcgaggatgcacaagtcaagtgtgccagactctccacatgcagatcatgcttgatataagatgcaatcttcgccgtattccggctggtaccgcctccagctccataagttacactgatgaactccggctttaagcctgccatctcctctgctgcctgtatcaccttatcatatcccgcatcggtcttcggcggaaagatttcaaaggaaatatgtattccgtcttctttcaatctgtcaataatcttcatgcaattttctcctgtgtatattttttctattctccaatgaggcttctgtacaatgcttcgtattgttttgctgaattcttccatgagaaatcctgctccatcgcccgctcaacgatcttgttccagtcgcgttttttatcatagtagatacgctcagcataccggatcgtatcaagcatctcatgtgcattgtaattcgaaaagctaaatcctgtacctgtcttctcaaactcattgtaaggctctacggtatctttaagtcctccggtctcacgaacgatcgggagcgtaccataacgcagactcatcaactggctcagtccgcatggctcaaacagcgatggcattaggaatgcatctgcagacgcatagatcttgtgtgacatatcttcggaataaaaaatattagccgatactttattggaatatttccatgcaaaatgacggaacatattctcatattttgcttcacccgttccaagcaccacaatctgcactgcgtcctggcacagttcatccatcacataatcgatcagatcaaatcctttctgatctgtcagacgagacacaataccaagcatcatcactttcggatctttatccagaccaagttcttcctgtaaagacaacttgttggaaaccttattcttacggaacgtatccaccgtaaaacgttttgcgatccgatgatccttaaacggacagtattcatcataatccagtccgtttacaattccgcacagatcattggatcttgcactcatcaatccatccagtccttctccaaagaatggcgtcttaatttcctgtgcataagtctggcttaccgttgtcaccttgtccgcataaacgataccaccttttaaaagattcgcatcccgatatgcttccagtttatccggtgcaaaataatactccggaagtcctgtgatctgacgcactgttctggtatcccagaccccctggaatttcagattatggatcgtcatcacactcttgatgcctctgtaatattcaccgagaaaacggaagttatccagataaaccgggatcagccctgtctgccagtcatgacagtgaatcagctcgggacgaaaaccgatcactggcagaatgctcagcactgcctttgaaaaaaaggcaaatttttcgatattccatctcggatctccatcatatggggcaaatccgctaaaataatattcgttatcaataaaataaaatgtaatgtcatcctgtacatacttcaaaattcctacataacgatcttcccctgccagattcatgtaaaaatgatcgacatattcgagctgatccttccatttctgattcatgcaggtatatttcggaagcacgacccggacatcatatttcttcttgtcaaagtattttggaagtgaaccgacaacatctgccagtcctcctgttttgataaacggcacacattctgaagatgcaaataaaatattcttcataactttccctcccattttctccgttttactaagccagtatttttctacattatactccattttgcgaagattgcaaaggtttctgtaccggtttatctatgtttgtattctaactggatggtatccgcgatcaatgccacaaattctgaattggtcggctttcctttccctgtgctgactgtatatccaaacaattcatccagtgtatccagttttccccgattccatgcaacttctatggcatgacggattgcccgctctacacggctggaagttgtctggtatcgttttgcaaccgttggatacagcacttttgtgatcgcatttaaaacatccatatcctgcactgccataataatagaatccctcaaataatgatagcctttgatatgtgctggaattcctatttcatgcagcaggtttgtcactctgttctctaaatccccttctctgatgtatggaacctgtgatgacagttcatcactctttttttcgtaatttttcatcggtcttctgactgttttgatccgattcaacagcatttcgttgttaaatggtttcataatatagtaattcgcaccccgattgaacgcatcttctgtaatccgttcctggccgactgctgtcacaacgataaaatccggacgtttctgtacacttttgtcctgattgatcttctccattacggtcagaccatccattttaggcatgatcagatccaataatacgacatctggctgcttattccgaatgatctgacacatttcttccccgtttttcgcttttccgacaacatgaagatccttgtccatgttgatgatttcctccagaagatccaaaatacgctcattatcgtcagcaatcgccacgtttacttgttccataattcctctccctcttgtttttgcctgaactttcaaacgccacgctttccattatatcttcctgctccgcaaaaatgcaagaaaatcaaggagaccttattcgacaaaactaagcggaaagattcgacaacatattctctataaaaataccgtacccttttgccgaattctgtacaaacacgtgggtaactgctccgatcaactttccgttctgcaaaatcgggcttccgctcattccctgtatgatgccgccggtagcatccagcagccgctgatctgtaatttcgatgaccagtcctttgttgatttcttgtccggaatcgtcgatatctgtcacttgaatgtcgtaattttccacttctccgttcacataacatcggatcactgcgtttcctttccgaacctctccccgcgccgccaccggcacgatttcttcctgtggaaacaatttctcagccgattcgatcgtcccatagatacccgcttctgtatttttgtaaatcgtgccaaggcgattgtaatgactgtacacgatcagcccttccatgctccccggaattccattctgccctttttgaatggaatgaatgcttgttttataaagcgtcccctcccggattgacagaagtgcacttgtatccatatcatggatcccatgccccagagctccaaaagctccatcttttgtcataaaagtaactgtccccagaccttgtacattgtcccttacccagattccaagcttatattctcccggacttgattctgcgggtttgatggatactgtcagcttctgttctcctctgcgcagcgtcagcgccacctgttcttcattcagatttgataatttctgaaacaattcttttttatttttaatctcttcctcattccacgccacaatgtagtctcccggacgcaccagagcttctgccggcttatatattttcccatccgttccggtaatctgatccgtacccagaaccatgactccgtccgtttccatataaattccaaccggcatccctcccactatgactccttcctgcatcactgcctgtgtactggcttctctgaccttttgagattctttttccgaaggaactgcacaaccaaaaagacacagcgaagcgataagaactgcccacagttgtcgatattttcttttcatttttgtcacatcctctctgccaagtaaaaaacggacaccaaaaggtatccgttttagtatgtgacatttttttattttcacactggaattctatactctctttgccatttctttcatttcttttgcactgtccagaatattttttgtcactttggcgcctccgagaagccgagccagttctcccacagaagcatcttcatccagtgaaaaaattcctgtcttcgttgtcgtctgatccgtctgcttttgaatcagatagtgagcatctgcagctgcagcgatctgaggaagatgagtaatacagatcacttgtcgtttctgcccaataatatgcagcttttctgccaccttccctgctgtgatcccactgattccagaatcaatttcatcaaaaatcagagtcggcgtatcttccttatccgccaacacggtcttgatcgcgagaaggattcttgagagttcccctcctgaaaccgtagtcccaagaggttttggcggttctcccggattgactgaaataaaaaattccgcatcatccataccggtggccgacattttcgcatctttgagaaaacgcatttccaactgtacatccaggaaattcaaatcctcaagccctgcctttatctcttttgtaaaagaaactgccgcctttttccgaatattactcagttcttccgcgcagatctgcatttccttttttgccgcttccgtctgagcacgcagattttcaatgtaagactcataatgttccagttcgtttagtctttcccgcttttcctctgcatactccaggatttcattgactgtatttccatattttgcctttaagcggttgatctcatttaatcgattctctgtctcataaaattcctcttctgaaaactcaaaactttttgcatattccgaaagttctctgttaaaatcattgagcagactgtcaatttccaccaattggccatacaacgcatttcctttttcatcaaaattttccacttcctgaagggaacggatcgcacggctcaaaagatcactggcattatttctgtcatcttcgcttgtatactgataagtctctgccactgcgctggtcagatccttgctttgcgtcatcctctggtacagagcgtccagctcttcatcttctccttcgcgcaggtgtgcattttcgatctcatgcagctcatactctgtcagatcaatttctttgcgtcgttctttttcttccattcccgatgtctcaagttttcggctgtattcctgatatgtccggtacgccagtgccatcttctgttttggtttttctacctgttctttggcatacacatctaaaaatgtcagatgatttcttttgtttagcaggcgctgatgctcatgctgctcatgaatatcgatcagcagacttgccacatcccggagtactgacatggttacagtctctccattgattttgctgacacttctgccctccatcagttttctgctcaagatcagcattccatcttccggaaaaatgtccatctcttccaactgacggatcaatgctttattttcaatggaaaacatcagctccacaagcccaaactttgcaccctttcgcagcatatctgcattgtatctcccgcccagggccagattcacagatcccaggatgatggattttccggctccggtctctcctgtgagaatattcaggcctgaccgaaaatccacttccacctcatcgatcaacgccagattttttacatgtaaattttgaagcatatttcttccctataatccttttgacacaatctttcgaattttatccatcacatgttccgtatcctgcacgcttcggattgcacacatgatcgtatcgtcccctgcgatacaccctactacttctctccatttcatagcatccactgctgctgcaacagccattgccattcctgaaacggtcttgatcacaagaatattctgtgccatatccatagaaacatacccgtctctgagaacccggatatatttttcgttcatttcatccttttccggagtcagaactacatacttctgtctggaaccatccacagccacttttgtaagccgcagatcacggatgtctctggataccgttgcctgagttaccttaaatccttctctgtttaaataatctgccagctcttcctgtgtttcaatatcgtgttgtgcgatcagttcaataattttcgcatgacggcttactttcattgtattagtttcctttcatcttttttcgcattgtcttcataaaactttcttcactgagttttgcaagtctggtcacatgattcgattttttgatcgtgacacgatctcctgttccgaggcgcagcatatccgctccgtcaaacgtcaccagtgcctgctcatcttttccatatcttccctgactgatcacaacctctatcgtatcctctgctgagagtacgatactgctggtattcaatgcatgtgaacagatcggggtgatcacaaacatactggcggttggttccaccaccggtccacctgccgacagattgtatcctgtcgtccctgtaggcgttgaaatgatcacaccatctgccatataactgttgagcaacgtcccatttacatagacatcaaaatgaacaattcgaaggcttccatctctggtaatcacaatatcattgaccgctacattccgataactgctgttcccggaaacttcaccggaaagcatcatccgttcttcaaacccaactcgattttcaaacagtcgatccagggcatacataaattctgtacgctctacttctgccagaaatcccaatgtccccagattgatccctatcagcggaaattcgtatcctgcaagttctcttgccgcccggatcagtgtaccgtctccccccagcacaattccacaatccacatgatccggtaccgttccaggaagaataaacccctgttcatcttcctttgcaagaatacattctctgccatgctgttcgatatagccctgaatctcttttgtgatcgcataatcgggatccttcatcaggttcgtaataatataaaaacgctccataccacacctctttattttgcaagtgtctcaaatgcccggtctacgaccaggttcagatcctcagaaagcgcatcctctaccggctgcggacatttcttcagatggatcagatattcgatatttccctccggtcctttgatcggcgaaaaatcaatattcaaaatctcaaaaccaatcgactgtgcatacaatgccactttttcaatcacttcatggtgtgtgctcttttcacggaccacaccttttttgccaactttttctctgcctgcttcaaactgtggcttgatcagggcaacaatctccccgtcttctttcaggtaattccgaatcggttccaatacttttgtcaaagaaataaaagaaacatcaatggaagaaaaatcaatcggttctcccagatcttccggtacaacataacggatatttgtcttttccatgcacacaacccgttcatcctgccgaagtttccagtccagctgtcctcttcccacatcgatcgcaaatacttttctggcgccattttgaagcatacagtccgtaaacccgcccgttgatgagcctacatctgtacagacctttccatccacgctgacatcaaaattggcgattgccttttccagctttagcccgcctctgctcacataaggaagcacatgtccgcgcacttcgatctctaccgtgtccggaaacgtcgttccggctttgtcctctctttgtccttctacaaatacatttcctgccataatgacagcctttgctttttctctggactctgccagatttctttttacaagcaatacatctaaacgttctttcatgtcaatctttccctatcgtcacataatctgcaataatctgttttacaatcgtctctgcatccagccccacttcccggcgcagtaattctacatttccatgctctacataatcgtccggaatgccgatgcatcgaacacctacgtccagttttgctctggatacatagtgaagtacttgttctccaaatccaccggacaccacattttcttcaatggtcacgatcagcctgtgatccgtcttcagcatctcaagcatctccgtatccagaggttttacaaatctggcattgatcagcgagcaatgatagccgatctctttcagtttgtcacgcacctcgacagccagttctgccatatgtcctacaaaaaggactgcaatatcctcttcttcatagaggacttcactctttccataaacgatcggagtacgaaactctgataatccctcatatgcagcccctcttggatagcgcagtgctaccggatactgaaagtccacacagaaccggaccatatctgccatctcccatcgattcttaggagacaggatcgtcatattcggaatcatattcaaaaatgaaagatcaaacagcccctgatgtgtctctccgtcacttcctaccagccctgccctgtccactgcgatcatcaccggaagattctgaagacatacatcgtggatcgtctgatcaaatgcccgctgcaaaaaggaagaatacaccgccacaaccggcttgagtccgcctgctgccagtcctgccgcaaaggtcagggcatgctcttcggcgattcccacatcaaagaatctctccggaaacatccttgcaaatctggaaagtcctgttccgtctgccatagctgctgtaattccgactacagattcattctgttttgcaatatcacaaaacacctttgaaaaaatatcggtataactgtcttttgtcgatttctgctttgcctctcctgtttcgatatcaaatggcacaatcccatggaatctggatggattctcttctgccggggcatatcctttgccttttttggtcagcacatggacaagcactgcatgatcgactcttttcgcttcctgaaaggtcttatacagttttcggatatcatgtccgtctaccggtcctaaatacgtgattcccatatcttcaaaaaacatccccggaacaaacaactgctttaatccgcttttcgtttttttcatctgatacagaattttttctccctgcaccggaatcttcatcaaggtatcttccacgccttttttcagacccgtatatgcttcggcagttcgaagcccgttcaaatatcgggacattccaccaacattttcagaaatagacatattgttgtcattgagtacaataataaaattactcctcagacgagaggcattattcaatgcttcatatgccattcctccggtcatagatccatctccgatgatcgaaatgacactatggtcttctcctctgatatctctcgctgccacatatccaagtcctgcagaaatagaagtggaactatgaccggtatcaaacgcatcacatgcactttcttttcttttggggaaaccgctcataccgccgtactttctcaaatcatcaaatccggcccgtcttccggtcaggatcttatgcgtgtaagactgatgtcccacatcccagatcatcttatcctgaggcagttcaaatgcaaggtgcagtgccatcgtcaattctaccacacccagattagatgccagatgtcctcctgtgacgctgatcttttctatcaaaaaccggcggatttcttctgccagttcctccagctcttctggtttcagctgcttgatatcattttctttttgtatcttttctaataacataaggtattcccccttattttagtctgtatatcaatgactccagcaaattttccagatagtcatcctttggatccagcgctcttaaatctgtaatcgcttccctggacaaatgctccacttcctgtttcgaagcatccatccccttccataccacatatgtcatcttttcatttttttcatcactgtgcactggttttccaagtacttctgttgtactggtcacatccagaatatcatcctggatctgaaatgccattcctacttttgaggcaatttcctgtattttctgtacattctcgtcatctgctccggcaagaactgctccgatcatcattgcggattcgatcagggcgcctgtcttcaaacgatagatgaactccaatttgtctccgtctatctgctcaccggatgctttcacatctactacctgcccgccgatcattccataaatccctgctttttgtccgagaatacggattgcttttccgatcatcagacttttctccggctccatctcaaatgccagagatgctgtctcaaacgcataattcagcagcgcatctcctgccaggattcccatatcttcgccataaacgatgtgtgttgtctttcttcctcttcgatactcatcattatccattgcaggaagatcatcgtgaacaagggaatacgtatggatcatctcgatggccgccataaatggttcgatcactctgcccgttccgccaaataaccggtatgtctcctgcatcagcatcggacgcagccgctttcctccggccagcatactgtactgcatcgcatccatgatcattccctggtatccttccactttgggaagatatgcttttaatatttcttcgatctgtattgttttttccttttgtatctctttaaaattcatgaacttctccattctcatccagaacctgaactttcttttccactgcgtcaatgatttcattacactgctttaataactgcattccttcatgatacaacgcaaaagactcctccaaagtgatgtccgatttttccatatcttccgtcaccacttgaagccttgcaaataattcttccagacctggtgtattctgatcctgctgttccatgtctgcctcctttatgcctgatatttcttttcttctatcgtccgtcccacccgggcttcgatccatccgtccgacacatagacccggatcgtatctccatgttctacatctgccgtctgacgcaccggacgcccttttgcatcctctacataggcatatccctgattcagtttttccagcggggataaccctttcattttttccacataaagtgcagactgatgtctcttttgctggagaacctcttccattctgccgcgcagacgcaattccagatctgaaatatactgtctgttttccaaaagcttttgccttggatgaaacaacttcaattttaatgccgcttgttttaaatactgacgggtctgttctgccttgttcaaaacagactcattcaaccgcatccggtactccatcatcagactctctgccgcctgatattcgtacacggcaagctctgccgccgcagaaggagtcggtgcgcgaagatctgccacataatctgcaatcgtcgtatctgtctcatgtccgacagcagagatcacaggtacactactctcaaaaatagcccgtgcgacactttcttcattgaacgcccacaaatcttccatcgaaccgccgccacgtcctacgatcatcacatcaacacccgcatgttccaacattcggattccctgtacgatactttctgccgcaccttccccctgcacctttgcgggacagaggatcagctgtacatatggattcctcctggctgcaatatggatgatatcctgcactgccgctccggaggacgccgtcacaatcccaaccctttttacaaacttcggaatgggacgcttgtactcctgtgcgaacattcccatttcttccagttctttttttaatttttcaaactttaaatacagttctccggccccatccagaagaatctcccgggcatacatctggtatctgccatctctctcatacacactgactgatcccagaacaatcacctgctgcccttcccgcatacgaaaagaaagccctgaccttgagcctgcgaacatcacgcaggctatcgtgccggactcatctttcaacgaaaaatatatatgcccagatggatgatatttacaattggacacttcccctttgacatacagccggttcagcataaaatcctgtgtaaacatattcttgatataggcattgacctgttttactgtgtagacattcttaagcatctgtccgccccgccatctttaatctgcaatcttggcaagcactccgtttacgaatgcaggaccttcttctccactgaattttttcgcaagttctaccgcctcattgatcgcaaccttcaccggaacatcatcgtcccatttgatctcatatactgcaagtctgaggattgccagatccaccttattcattcgggaagttttccagcccgttgctttttcattcaggatcgcatcaatctctgccagcttctccacaactgcttctaactttttctgtatgtactctctgtctttttcttttgcacttgtcagctcttcaaaatacagctccagatgctccggcatctcctctaatgtattaaattcaatctggaacaacatcttaaaaatgtgttcccgaagttctgttcttaccatatcggctccttccgtcccttatgtctctttcgtccatatttctttttgcaggacttttgatttttcgcatagaaaaaggatgtcctgcgacatcctttattatactacagctatcctgtcttttgcaatgaatttctattttacaggctcctgactctccatctccacacctgcaactttgacattcacatctgcgacctccaggccagtcatgttctctacggcgctctttactttttcctgtactttggcagatacttccatgatactgtaattatacttcatattcaatgccaaagataccgttacaacaccttccagaacatccaccttcacacctttggaaagattcttcattcccagtctgctgatcagttcgttggtgatgttgcctgccatagatgcaactccttctacctctgtcgccgcaagcgccgcgataatagcaactacttcatctgctatttttacctctcccatgctggagtcatcctgtattgtataaatatttctttcgtcctttgccatgataagaccctcctgtttgtgtctgctgtttgcgctaatcttctttttcacacccatccgggcaactccataactcatgccttcgacgggcagacttcatctgataagatatattatatcagacataccctgcattgacaagggtcatgagcgaccgaattctgacaggatcagtccctcatttcgctcctgcgtcatccggatactccactcatgggtaaagagcagaagcggtctgtctttgagatctttgatttttttcatgtcagaagttcccaccagacgattcatatcgatctcctcattttcaatccaacggatatactcgtacggcagattttccagacggatttccactttatactcattttccagacgatatttgagtacatcaaactgcaggactccgactacgccgacaataatctcttccattcctgtattgtactcctggaaaatctggatcgcaccttcctgggcgatctgattgattcctttgacaaactgttttcgtttcatcgtgtccacctgacggactcttgcgaaatgttccggtgcaaacgtcggaattccttcatatgcaaatcgttctttggacgttgtcaacgtatcaccgatggaaaagattcccggatcaaatactccgataatatctcctccataggctttttcgatcatctttctctcacttgccatcatctgctgtggctgggaaagacggacttcccttccgccctgcatatgatacacattcatccctgcctcaaattcaccagaacagatacgcataaatgcaattctgtcacgatgtgctttattcatattcgcctgaatcttaaacacaaatgcagaaaaatctttttccttcattgggtcgatcagtccctgatctgacattctcggaagcggagaggatgtcatcgcaagaaaatgctgcagaaatgtctcgacaccgaaattggtcagggcagaaccaaagaataccggtgaaagttctcctttgcttaccagttcctggtcaaactctgctgccgccccatcgagaagctcaatctcctcttcgagagtcactttggcctctgtgccgatcagccagtcaatctctggattattgatcgctacttttttgacttctcccatagaagttcccttttttgtatcggagaacaactccacttcttttttctggcgatcgaacactcctttaaattcttttccggaaccgatcggccagttcaccgggcaggttgcaatccccagctctttttcgatctcatccagaaggtcgaatgtatctttggcttcccggtccattttgttgataaatgtaaaaatcggaatgtggcgcataacgcagactttaaacaactttcttgtctgagcttccacacctttggaagcatcgatcaccatcaccgcagagtctgcagccatcagcgtacggtacgtatcttccgagaaatcctgatgtcccggtgtatccagaatgttgatacaatatccgccgtaattaaactgaagtacagacgatgtaactgagatacctctctctttttcaatttccatccagtcggaaactgcatgctttgcagttgctttcccttttacggaacccgcctgattgattgcccctccatatagaagaaacttctctgtcaatgtcgtcttacccgcatccgggtgagagataatggcaaacgttcttcttttttctatctcctttgtaatatctgacatcttatctcttctcctgttctataaaacttcacatgtccttttagtgtatcacaaggatttctctgccgcaatccaaatttctttatttttccgtttctccggtttcatggatcggagtgatcacaattttttccggcgtaatattggtttttcttgttacaatatcttcaatctgtgcacgatttgcatccgtcaattctgccgcatttaccacaatatctgcggaatctgaagtcagactgacaacggattctgaaaatcctttggatgccatcagtgtttccaccgccacttcctgttctgaaagctgcgtcatctgcagcatctgcgcaattgcatctttcttttcctcttcgctgatatttgtgttgtcaatgatcgcctgcagtgtttctttattttgggaacgcatctgttcccttgcaattttcgcctgcgctacggtattttccgcctccccgctggtcaaaacagcttctcccggcgtgccttccacttcagaatcattacttgcaatctctccgtctgtttccagatcctctgccgagatatccagaagttcctgattggcagttcctgcacttgcttcttttgtcttttcttcttttgctccaaacagccgtcctgaataattcagataccctgcgatcgcgatcatcaccgccagcgctgtaataatgatctggtttttcttaaacaatcgtttcaaaatcatatcctcctctttttctttctgttttatacatttgtccgtttcattatttttatcttatgcgcatccactccaaataatgcctgcacggcctctgtcagattttttgccacaaccggattatctcccccatctgccgcaatgaccatcccttcgatctcgggtgtcatctccttgcttacataaggggtctgtgtcccgtctgatttttgttcatagacgctggtatgattgaccgactgatcatccgaacttctgctgcctcctttactgtcctcttctgttacatggttttcttcgctctgactgtctttttcgattactttttctccggaagatttcaaagtgatcatcacttttacttttccgactccttccacgcattccagcgtactttctacccgcttttccaacaatttttcatattcctgcccgaaatctcctccctccatttctgtttcttgtacccccgcccctgtcccgattctttcctcttcctgatctggaaccggggaaacgatcaccaccagcagaattcccgccaaaagcaggatgaaaagctgttgtttcgcaggtaattttccacttttcccaaatctggaaatccattgtttccatttattctccaacctgaacctcccccacttcgatctgcacttcttcctctgtttccggaaatgcctcactgtcattttgctcttgttcttcctgcatacgtttccagaaagacgtctgctccagctcttttttttgttcctctacccatccggcaaaatcatattccatatctgtcagcttcagcaacggagtcatcaaaagaacaatgagcacaagtcctgcaaaaaaacgaacatatttttgataggattcctgtggaagtgcctgcaaaacagcactgaccagaatcagataaactgccagatcctgcagccactgataaagctctttcaacatgttcttccccctttatgcagcagaagctgctactaccgcaatggtgatcagaaacaaaattcctgttgtgcccatcacttttcccaacatttcatacccctcactgacatttccaatgcatgacgtgatccgcttgtctgacaccggctgcgtcactgctgccgccattttgtacaaaaatgccaaaagcagtactttcagaatgggaaggatacagattcccgctgcgatcactgcgcctgccatcccgatcccgtttttgatcaacactgccgttccaagcacaacatccatcacagagcctgcggtatttccaactcccggaatcgcctccactgtttttgtgataaagctgcgccttactgaatctgcggcaggtgccagaattccctgcactacattgattccgatcacacatgccagcatggtttttagaatccatcctgtcagtttctccagaagctccgcaaactgtgataaaaattcttctcctgtcagatttcccatgacctggatcatcatataaacattgatgaccggcatcaggaaattcaaaattaccgtttctgccagaaaaatcagaaacaacaccacctcaaagaaaaacatcgacgtaagacttccagaggctgctgtcaccgccagaaaataggtgggacagagaaccttcataaattccagaagacattttaaagaggtttccatctccgacaccgccagacgaaacccactcagacacagcgcgatcagcagcatataaagaatataaaatgcagcctccgatgcctgtctggctccaaatgcactggaaaaattggcaaacactgctgcaatgactgcaatcaagagcaagtagaccagaagttttctgtgtgtctgcagttcataaaaaaactgatcccagagaaactttatgaattgttctcctgcctgtttcagatttcccgacaaaagagtttctacaacctcccgaaatttcactttctctcttggaaacatttttttcagactgtcatccaaatctgaaaaatcaaactcatccaacatctcctcctgggtgatctgcagtttttcctctccggcagcataagctgtgcgcactgtcccaaacagacacagtcccaaaaacaacatgccaacgattccatattttctcatagcaaaaactcctgaatggtttccagcaatgcaagcaggacaggcatccccaccacaaggatcgccagtttgccgaatatctcaatctgcgctgcgattgcctgatagccggcatctttgcagattccggaagaaaaatgcgcaatgtatgtaatgccgaccattttcagcatgatcacaagatattctgtatcaagggtcaaaaaactctggatctgcttcactgcctgaacaaacacttccagttttcccgcaatgcagaaaaaaagaaaaactcccgctgccagattcatcaagaatccgtactctgctcttccgcctttgagctgaactgccagaagaactgccgccattgcgatcaggctgacctgcagcacactcatatgtccttctcctcctcttttacagcgaaaacagacgcttcatggatgcaaacagctcataaatgtaaggaagcacccaggacaacaccaggatcagacccgcaaaactggtcaaaaacgcctgttcctctctcccactgtgttttaatacctggctcaaaatagataccagaatgccgactgcggcaattttgaaaataacaccgatcgtcatgaattcctcctgtctgattcgccgacagcatatttctcaaaacagcacaatgaccagaaacagtccgctcatcacaccaagccagtttccgattcgcttttttgccgtaatttcctgtcgggtctgctcgatttctgcctccagattttcaagatacatctgcatacttgttctgcccattctcacatccatttgtccgatatacatccccatttccagaagcgctcccatatgtctgttcttgagatgaagatcctttaaatggactttcatactctcctcccagatttcagaaaaaagttgcccgcttcttgcctcgactcttcgctccagatccatcatccagctgcggtacggctcctgtacccgacgggcagtttttccaaaaatctcggaaagcggagacgcactgtattcgatttctccctggatcaactccaaaatacggcgaatgtacatcagtttttccagatattgctgctgttccactccatataaaatgcctcctgctgtcgttgccgacagaatcaggatgcagccgatcagcttctgcatagaagactcccccgttcatcaaagatttctttgatcattcccggatgttctctgttttctaataccacatagcgttcaaaacggcgctgtctcacaagctctgcaagtcccggtttggatgcgatctctgccatagaattgccatggacactggcgatcagtttacacccacactgcatggcatactccacggcacgaatctcttcctgcgcaccgatttcatctaccgccagtactcttggagacatcgaacggatcagcataatcattccctccgctttgggacagcagtccaggatatcagtcctgctccccagatgattctgtgccactcccagataacaccctccaatctcagatctctcgtccaccactcctaccgtacatccttttacatacctgttcccgtcagaaatctgccggatcagatcacgaagcagcgttgttttccctccgcacggcggagaaataatcagcgtatggcatacttccctgttctttgtgatcagaggaagcagcctgtccgcacatcctggaatttcatgtgacattcggatattcacagaagatatgtactgcagactttttaccttttcctgttctaaaattgcctttcctgccactcccacacggtgtcctccttccactgtcagaaatccctgacggatttcattttcataggcataaagggaataatgactgctgtattccagagtctcctttatctcctctttggtcaccatatacttttttgcctgccctgtcggcaaaaacagttcttctccctggtacaggatcaaaagcggctgctctgttctcagccggatttcctggagcttgtcataatccaattcttccctttcaatcaccctgcggattccaaccgcaagaatgtgaagaatctgttgttttcttctctcttcattcatcttgtccacctctttatcccatgtatatgaaagaagcaaaagtttattcctgtggattttaaaattttgagatttgcaggattgtcgtctgtctgaaattaagataaactaaaagaaaggaaaccaaaatcacttgtatgcgaacagaatgcagatacaatacagcaaaagaaaggcggtaaacaacctatgaaacttgtatttttagatgcaaaaactatcggagacgacatagacctgtccatcttcgactcatttggcgaagttataaagtatccgttttccactcagcaggaagtaccagaacgggttcaggatgcagacgtgatcattgtaaataagattcaaataaatgaagcctccatcggcgctgccagaaatctgaaactggtctgtgtcactgccaccggcacaaacaacctggacaaggaatatttagacaaacgcaaaatcgcatggagaaatgttgccggatattctacagaatcggttgctcagcatacgtttgccatgctgttttatcttctggaacatttgcggtattacgatgactatgtcaaaaatgactgctacacaaacgacaccattttcactcatttttcacagaccttctgcgaattaaaaggaaagatctggggcattgtcggccttggaaatatcggacgcagagtcgctgcgattgcagaagctttcggcgcacaagtcatctatgcctccccatccggtgcagcacctcaggaaggctaccatcaggtttctctggatacgcttcttgaaacttctgatatcgtctctgtacatgcacctttgaatgaatatacagaacaacttatgaacctggaggccttttgtaaaatgaaaaaaagtgcaatcttcttaaatctgggacgtggtccgatcgtcgtggaagcagatttaaaaaccgcactggaaacaaatgagatacaggctgcaggactggacgttctgtgtgcagaacctatgtccgaagacaacccgcttcgcggtttcacggacagcaaccggctttttatcacgccccatatcgcatgggcaagcatagaagccagaacaaagcttatgaacatcattgcgggacaaatcaaagagttcttcgggctgtaacgcctgaagaactccttgatcttcttatttttctgcaaacagatatcctgagaaatcatagtgatataccctgtaaatatagtatttcgagagattcatctgaaactgttttaccagtgttccatcttccttgtattctccgatcagtccctgcatcccggaatctacaagaatggtatcctcacattcctgcacactgctcacatatccagaaaacggaacttcaaaagactgcaccaaggtataggttcctgcattttcatccactttatatctgtaatagcaggaagtcgttcctgaagagagatccgttgcaatctgatcgatctgaccccagtcataatccggtctggactcactgtatcctaaattgttgttaaacagatacagataatactgtccgtcaggcagtgaatcatctgtcacgtaagtcactgtatgctgcccgccggcactggaaaagcttccgttactctcatctttcgtaagcagaagattctcatatcctgttccttcccagaaactctcttctccgatcatatacccgatttcaggggttgtacttaagttctggacttttataatcgcagacgtttccctggaactcaataaaatggaatcttctcccatccactgaatggtattgatatggatccagtccagattctcctcctgatccattcccagactttctttgtaatctccaagcagatcctccagatctaatacacaaaagacttcccctgtggaaggattgagttgcaatacacagtcctcgaccgtctgtttcccggtatctgtcgccaaaatcagcagatttccgtcatcatcaaaaacataatcgtgatgcagttgatagtttcccagatcgtagacttgctccaccatacccagttcattcacagctgcaatttttgtctcggaaatactgtaatacatccgatcgttctcaaatacgagccgatggcttcgatatccgatcagaggaacttctccgcggatcgttccattttcatcataatagtacataaaatcgacagcatcactatcatttccaaggatgacatacaagccggaatccggaagcaaaatctgactgctcgcatctgtctgacctgctgtctgcttcagctgtacctcttcttctcctgcaagacttcccattttatatttacaggaagccgtggttgcagttccgtcttctgcttccagtgtaaaggtgatcgtattttccatatctggaataagaccgatgatctgaaattcatgttctgtggtataagtctcttcctcctcaacttctcctccaaaatctgcaatttcgctatccggcacagaaacaacgtaggagacggaaactgggacttctgttgtaaaatagacataaagagacagcgtatttgtcccaaacggattttgttccaccagcatgttctctgttgtatatgctccggatttctttgctgtttccagccgctctttgaccgcctcctgatactctgccgtataaatctctttgacctgttctttctttctggatgtttcctctgctgcttttgcttctgcctgccttgcctggtactttgcaaatcccagcattccaaccactgcagccgcagcaagaaacatcccaaacactgcccttttgatccatttcatgtgttttctcctttctttgatatccagatattcctttacaactacaggcgatacacctcatctgccgcgtctgccacctcttttgaatgtgtcacaaggatcacacaccgtccatcctcatgtgccagactcaggaaaattttcataatttcattctgggtatccggatccaggtttccggttggctcatctgccaccagaatctgcgggctgtaggacagcgcccttgcgatcgcaactctctgctgctgcccaccggaaagctttaaaatccggcgatctgcctccctgggtccaagcgctacttttttcaggacttcatctgcatgtgcttttttgtcttcacacggataccctgcaatgtccatggaaagaatcacattttctctggcagtcagtttcggcagcagattaaaactctgaaagatcacaccaatatcgtgactgcggtaatcatatcggtttaaagaagagatatcttttccgtttaacaagatattcccggaggtgggagcagccagcccgcagatcagggagagaagcgtggtcttccctgcccccgatctcccagtgatcgcataaagttttcctttttcaaaggaataactgatatcagacaacacctgatttcctcttttttcataagaatacgatactttgtttaattctaagatactcatttttcttcctcctaatctcggttgctcagtattttcaatggatcataacgcataataaaaatcagtgccgtgcagccggaaatcagggtcagtaaaacgccgatccccaccatctccagaaccacctgcatatccgttgcagaagaaatgctgctgatataattggctgcctgtacaaatccaggacctcctgcatttggggcttccgccgcctctgctttctcttccgaacttcccggttgcccaggcgcttctgtaccaccctgcgcaccggtttctcttccaaatcgctgatcttgtccggaagaagccgtactttcgatctgctgtgccagaaggtgattggtcaccggtaccgaagaaaccgctccgattccagctccgatgatcaaggcgcagaatgtaatacagagagattctgtcaaaaactgtactgcgatcttccatttcttcattccgatcgccgccagaactccgatctcatatttccgttcccgaattgcaaaaatgtgcagaacaatcaggatcaccgccccgattgccaaaatgaccatcaggaaatatcctgcatattcactcaaatgctgcagtggctccagactctcttcatacgaagtgaggtcactggaagaaactgtgtagtcatcagaaagtcccatttctttgacttcatcctgaaatttttcataatctgccacagaatcaaatgcataggttccattcaacatcgaacgaagtgctgtcgttgttgtttctcctgttgtactgtccgttgttgttgccgcattctcttccgactgtgtcaggatcgtttcgaatgtctgatagctgacataaatctgattggagctgtctgctcctgccataaatccacccatcatactggacgccgaatcgcttgtagattccgtctcatagattcccgcaatcgtgagtgtatatgtttcatcctcctgattcggattggaaaaagtaatcgtatctccaactgccagatcattgtaagatgccagctctgaactgatcacacaagtattgtctgccgttccttctgcaaacatctccccttcggcaatggaactgctaccatcaacaaagtctttcattgcagcatcggaactgtagcctgtgatcgtaaaatctccctgggttcccattcggccgccgcccctgtcatcctgctgcatgcccatctgtccgccctgtcccggcattcctccctggctctgcccgtccgatgaattttcctgagttgtatcggaatcggaatttccggttatatccaccggttcgatcgattctccgtttaaagatgcggaagccgtgtagtaaaaatcagaaacgctttctgcctctgcatatttctgcagctcttcaagcgtcagattctgtgcaccttccagtgccgcctttttatcttctttgttttccattccctgcatcattgcctcacgatcgattccaatctgtgccgtaatcttcagatttttcatcgcatcttctgccgcctgatctgacgcagactgaatagaaagagaaatacaagctgacagtgagatcacaaagacaatgatcccgatcaggatgctcctcccttttgctcttgtcattcccctccatgcgttctttatcatatacatcgttttgtctcctttcttttcgtcctgttgacctttgtcagtataaatttcctaccttaactcaaccttaaagaacgaaaagaaaagtgtgaacactatgtgaaaaggcagacattctgcgtattttcacagaatatctgccttttttttcaaattgactgcgcaagcgtaaccataatcgtcagagtactcccatcggaagaggatgctgtaattttcccccgatgtgccagtacgattgctttcgcaatggacagtccgattccatgccctcctgtcccggaatttcgagactgatccagcctgtaaaaacgatcgaataaaaatggaagtttttccacatccagttcttccgccagattggtcacacagattacaatgttttttccctttttttccatctgaaaaaatatctctgcattttccggagaatatttcagtgcattgtccagaagaatcgaaaacagccgctgaatacttttcaaatctccataacacgaaagcatcggttcaatcctgcacttcaagttcttcttcctgacttccgccaatccctgaaaggactctgccatctcctctgccacctcggaaaccggaacatccgatttctgaatcgccggactgtcttcttccattttggaaagataaatcaggtcatcggtcagagttttcagacgaagggtttgtttctggatatctttgctccactcattctctccatattccatttccaaaatcgacagatctgcatcaataatggtcaagggcgttttaatctcatgtcctgcatctgtaataaaccgtttttgcttttcgtaactttctgcaaacgggcgcacaacttttcgggagagcagcaatgtcagcacaaaaactgcagtcagtcccagacaggatacccagatgctggtcacaagaaaattccaaaatgttgtcaaaccccgtctgcaatccagaaagatcacccggatatttccgtcatccagtgtttctttctgatagcggtaatcggaaaggaacccctttttgccggaagcatccatggcctttttagcataagactgtgccgtttcatcgtctattgcagcaattcttcccgtgtctgtatgcagcactgttttattttcctgaactataacagaaaagtaccgggactcataaggaagttccggagatatttcatgaacttttccaggaggctttggcatcttttgatccttccgtggaagattttcttcttttctgtcagtcagatccggaaagcgcccttcattttctgccagaatattcaggatatgatccgcatcctgcgtcactttttgataatttaaaagattcactgtcccaagtaacacaaataagacgacaaatactgccagcatggctgcagcaataaatttaagccgaagttttttcatcatatttcacgtacctccagagaatatcctgcatttctggttgctttgatctgaacatttgcctgcaaagaagccagttttttccgaagatatgagaggtaaacccacactacgcttaattgggtatctccttcatatccccagactttttccaggattcgctccgttgaaatcagatgggtcggattgctcatcaaaagttccaatatctgaaattctttattggatagctgaagacttccggttggagatgacagctcattcgtcgcacgattcagcgtaagatttccgagtacgatcctggaatccactgcatctgtactgttccttgtcattgcacgaatacgggcaagaagctctttgggcgcgaatggttttgtcaaataatcattggctcctgcgtccagaccggctaccttatcatccacttctgatcgggcagtcaatatcaaaaccgggatgcgatttttcgatgcccgcaattctttcaatacactaaatccatcttttttcggcatcatcacatccagaataaggccgtcataagcttccgttttcaaatattccaatgccatctctccgtcatataccacatctgcacagtacccgtttttctctaaaattgtacaaagggcttttgccagagacctttcatcttctgcgatcagtactctcataaaacctcctgtttgtctgctttttcatctattttacaatatgaacccccaaaatgacagcacattttacagagcagcatcttcttttcaaagatacatcgatacactctcatataaacaaaaacatacacaaacaaaaaaatatcctcaaaatcacctatttccccttgttttatattatactgacactatatgccttcccggcaaactgacgataacgaggtgatcctatgcaaaacatgaactattattatgacttttccggacagaaattcaatcatcccttaagtcttagcatcaacagctttgaccgcaaagtattttccagacagaccagtctggagctttcctatgttctcaagggcagttatgaggtgatcacagaacacatctcccactccctgaccgagcaggagcttgctgtcattgcaccggacgagatccacatgctgaaaaagctgcagcctgaaagtgtgattctgaccattcacattgattttgagcggattccggaaaatatgctcggttcctgtaaaaatctgttccatacaatcttgtgtactccggtaagcaatgccgctcttttacactccctggaagaagaaatccgtcggcttcttatggttcttttcaatggagattccgcagatggaaccgatctgtttgctctcaatgagattatgatgaagatcctctgcattgcaaaaaagcagcgcaatacaccttttgaacagcttcctgtggattccacccaccacgaaaactacgtgcgggcgatccagtttatcgatcgccattatcaggaaaatattcatctttccgacattgcaaaaacgctttctttcagtaccagctatacctccagactgttcacccgctataccggactttcctttgtcaaatacctgtcctatgtgcgggttcgggaatctctggaagaccttctggaggggaaagcttcgatcgaagagatttccggaaaatgtgggatgccaaactccaaggcctattctcagattttcaaagaactgtatgggattacaccaagtacctatcggaagcgcttcgtaaaaaatctgcttcctcttcccgaacaggaaacacgtcccatggaatttacacaacagcaaaaagaacttctcacccaggtttttcatctgaattctcccggaaaacagcttctttttcacaccgaaggaattcagatcgagacacaaggtgatacccttttttgtaccattaaaaatacgcaaaaaaaagagtttctcctctctccgcaagaacaggatattattttaacgatacgcccttcccgcacagaataattgctttctatttccaggcagaatttgtcctgttttacgaggaaattaaactttataaagaaaaacagaacaatttttgacgcttattgtgtcaggaaaaggacgatatttttagcaatttatattaaaatgaagttagaatttattcaggaggattttcatatgaatacatatccaaaactattctccccgatcaaaataggggaaactaccgttaaaaaccgcatatttatgccgccgatctctaccaatctggcagacaaaggatacgtgacagatgctcttgtcgaacactatgctgcccgtgcaaaaggaggggtcggactgatcgtaacagaagttacgactgtggaaccaacctatatttatcttccgggagatatgtccatctgcgatgacagttatattccaggctgggagaagctgacttctgccgttcacaaatacggcgccaaaatcctgccgcaactcttccaccctgcttatatggcattcccgattcccggtactccacgattgatcgcgccttcttttgttggaccatattatgcaaaagaagctccaagaccggtcactgtggaagagcttcaggtaatcatccgccagtttggtgaagctgccctgcgtgtaaaaaaagccggcggtgacggtgtggaaattcatgctgcccacgctcacggacttctcggaggttttctttcaccgctctacaataaacggaccgattcctacggcggagacatcaacggacgcttaaaactgacactggaagtcattgccgaagtacggaaaatgtgcggaaaagattttatcatcgatgtacggatttcgggagacgaatattccgacggtggtctgaatctgaacgatgcagtttacgtttccaagcagctggaaaaagccggtgtggatatgcttcatgtttccggtggaacgaccatcaaacggggaagttcgattcctgcacccggaaccaggatgggttcccacagcgcactttctgctgaaatcaaaaagcatgtctccattcctgttgcaactgtgggccgtattaccgagccttggctggctgaagagctgttggaaaatgacaaagcagatatctgtatgatcggacgtgcaaatctctgcgaaccagaattctgtaataaggcacaaaacggacaggaggcggatatccgcccatgtatcggctgtctgcgctgtctaaacggtattatgttcggaaagcgggttgcctgcaccgtcaacccttctctggaaccggaaaatgaagacactatcctccctgcagacgagaagaaaaaagtgcttgtcatcggtggagggcctgctggaatggaagccgcttatgttgctgcaaaacgggggcatcatgtcgttcttgcagaccgtcaggatgcgttgggcggaaccgttcgcatcgctgctgttccgattgccaaacaggatctgactcatctgatcaaatatcaagcacacaaactggaagaaacacaggtaacaattcgcctgaatacagaagtcactgctgaaatgatccaaaaagagtatccggattatgaagtaatcctctgtgccggtgctgctccgatcgttccggaatttatgacacactttaaagactggatgactgcagatgatgttctttatggaagaaaattcccaggccgtaagatcgttgtcattggcggaggatctgtgggatgtgaaacagcagattaccttgccccgattctcaatgaccgtttccccagaaatcgagagatcactctgatcgaaatggcgcatgaaattatggaaacagaaagtggtcctggaagaagtcttctggcacaacggatgatggaaaaaggaatccatatcctctgtgattcaaaagtagaatccgtcagcgaaactgtgatccaatataccaggggcggcgaaacttatgaaatcacagatgcagacactttggtccttgcaatgggatatcgctcatccaatattctggaagagcagttaaccgctgccggcatttcctgccatgtcattggtgactgtaaaaaacctggaaatatcaaagatgcaatcaccgagggataccagactgcattgaaattataaacaaaaaagctgagatctatcatcctgtttttgatgataaatctcggcttttttaaaatatttttccccttccgacgccttctcccaatctcacttttgtctcaatcccatgcagagaattctcccagatatccggatccggcattgcctttcctttttgtgtcagcaaaatgatcgtagaacctccaaatgcaaaattccccttttcttgtcctctccttactcttgctgcctgatggcgattttcaatttttccgactaacattgctcccacttccatcatcaaaaccgtaccaaaattttccgagcagagaagcgaaaactccctggcgttttctttatagattgggaaataatcattcgccaccggattcactgtgtgcaatactcccggtattttcacattttccgattttactccgtcatccacataaatataacgatgataatcctccacacaaagtcggaacacccacgcatatccacctgtataacgtctggcaagcctttcatttttcagaagactctccgtactgtaactggtatgtttgatctgaaaacgggagttttcttcgatcttataaacactgagtcttccgtcgcaggggctgatcagtttctcaggattgcgaacgatcctgcgtgcccccggaagtgcttttcgcttaaaaaattcattaaaagaccggtatcttttttgctcatattgatacatgggaatccgatttttccggataaaccatgcagtcaatgggacggatgcccgggaatccaaaaaagctgctgccatctgtgatatacgcggattgatcagccctttcataaaaaatcttcctgcctcatgggtatacatccattccagcagtcgatcctgccttgaagtacagtcttctatatttcctcttctgtctgccagtttcatcgtgttgcctccttgcccttttttatttgattctttcaaatgatatgtgctggaaaaaccgctctctgcagaattcccaccatcccccctgataaagcaaaataaacagaactgcaattgctacgacaccgacaaggactgtcagttctttattcgttggtttgcgaaatttaaaatctgccacaaataaaattcccacaactgccactgtaatatgaagtgcatacaaaaaccagcggtatcccggaagtatcaatgatgctacgaacaacagtggaagaaccacggacatggatgtaatcggcagtccctgataatactttcggttttcactgctttcttgttgtcgttttgtttccatgacattaaaatatcccagccggatcacccctgcaagcccatacagaaccagaatagccatactgtaaattctgcgcatccccagttcgtaacataatacgatcggaaaaactccgaaacagacgacatcacacaacgaatcgatctgtatcccgaactgcttttcatcttctgttctgtttttctttgtccgcgcgatcttcccatcaaacatatcgcataatccggaaagcgccagacagaataccgcccatttcggatgtcctgtaaccgcacaaaagattccaataatcgatgaagtaaaactgatataagtcaacaccaccgtataatcataaaaccctatcattccctatgccactcctttatccttttcatttgttttctcacttcctatcgtaagctgcgccacaaccgtgaacactgcactgatcaaaagttctccataataccccaacccacggctaagtaccattcccggcagcaaaaatgtgccgaataccggccgaaaaatattcaaaaacaaagtttcactgattcccatgcctcccggcaaaggaagcatatctaccgaaacagagatgactgcctgcaaaaaaacaacagcccagaaagatgttcccgaaagcccaaacgccagatatacaaaccaggttgctgcaaataaagccattctctgaacaaatgtaatcccaaatacaatcaggatcacacccaggtgttcttttaaatataccgctgttccccggtatgtatccatagatgcttccagcttttccagacgttcttttttctgtttcatcaaatgcagtttttccagaagatgcatcccctttataagaattactctggcaagcactggatgaaagaccaaaatcgtcataaacgttacgcaaaatacattcagcgccagtcccagataataaaccggcaaaataccttccagatatcgatgcaaaaatccctgaccgaatatcaaaattccaattcctatgacaacaagaaccagcttatatgtaatcgttacgatcatcaaaacaacggtagacacgggaatcggtatcttttttttcttcatataataaatctgcatcggttgtccgccacttgcggatggtgtaatgcagctaaagaaaaaaccgaccgatgagaataaaaaacaagtccttttctttagtcttgttccgtaagactgcatcatgtaccagatgatgatcgattctccccagataaaaaacaataccagtgcaattcccggaatcagccattcccattgtgctctttgaattgccaataacatactgtccagatcttctccgtgaaacactccatatattgtcagaccaaacaccacaagaagaaatatcagattgaatactgcctttttcttatctctcatgtctttttcctcctgccaaatgaaatatccaatgctgtatcttctcgcaaaatctctgatacgcctgataccaggatctgttttgattgatccgaaagcaaatttctgccaggatcacgcctcctgccacatcccagagtacgtgttgtttcgtcatcagcgtggacaaaaatacacaaatcgcaattccacaggacaaatactgataccacttgggaatttttttgctcccccggattcccagaaaacaaaaccaactcaccagacagtgaatggacggaaacagattatctgcagcatcgatcgaataaagccagagcactgcctgattccagaatccatctgccacgatctccggccttgtatttgttgtcgggaacaacacgaaaaaacaaaaacaaatcagtctgcttatagcatctgcagtaaaaaagcgatacacttgctctttttcctgtcttgcgatcaaaaaataattgactgcccagaacagataacatccaaaataaattgccagtgtccacggtataaaaggaatctgcttatccagcattgtttcaatattataatgctcccgttcggatgcgatccatctggcaccgttatatgccagtgtattccacaataccgccaataaaagcggcacgattccgtataccgggatcaacttcttccgtctgtacttctgtctgtttttcatgttgtctgttccctcttccccgttcatttgacagttcttagtataatctttttcaaatacttcctcaataatctttacgatatctttaagaatctttaagaattcctaagaaatagcaatcattttgcatcccttcccctgccataccaaacaaaaaagcccaaaacagaggaaattctcctctgccctgagctttctcctgacaatctttttcctggtgcctagtcttctgctacatctttcatgctgaagctaaatcttcccatcttgtctttaccaagacatacaactttcacaacatctccaatgttcagaacatcttctaccttgttgactctttctttggaaatcttggaaatatgaaccattccctcttttccaggtgcaaactcaaggaatgctccaaattctttgatgctgattacttttccttcgaaaagctgtcctgcctcaaaatctgtcacaatcgtagcgatcagctttgccgctctttccatggattctttttctgtaccacagatagaaactgctccgtcatccgtaatatcaatcttcacgcctgtctgttcgatgatcgcattgattgtctttcctctctgtccgacaacatctccgatcttctgtggatcaatctgcatctggatgatcttcggtgcatacgttcccacttcttttctaggctctgcgattgcttgattcatcacttcatccagaatataagttcttgctttcttggtagctgcaattgcttcttcaataatcggtcttgtcagtccgtggatcttgatgtccatctggatggctgtgatacctttgtgtgtaccagcaaccttaaagtccatatccccgaagaagtcttccaacccctgaatatctgtaagaaccagatagtcatcatctgtctctccggttaccaaacctgcagaaatcccggccactgctgccttgatcggcacacctgctgtcatcagtgacatactggatgcacatacacttgcctgagaagtcgatccattggattcaaatgtctcagacactgtacgaatcgcatatgggaattcagactcactcggaagtaccggaaggagagctctctctgccagtgctccatgaccaatctcacggcgtcccggtcctctggatggttttgtctctccaacagagtaagacgggaaattatagtggtgcatatatctcttggaagtctctgcttcatccagtccatcgattctctgtgcctctgaaagaggtgccagtgttgtcacagtacagatctgagtctgtcctcttgtaaacattgcagatccatgcactctcggaatcagatcggtctctgctgccagtggacgaatctgatcgatcgcacgcccgtccggacgtttgtgatcttttaagatcatctttctgaccgtttttttctgatactggtacacagcttctcctaacactgcaagccattcttcgttttctgcaaaagcttcttccagtttttccgtgatcacacgaatattttcttctcttgtctgtttgtcatctgtaaagactgcttcttccatctctgccggaggaacaatctctttgattgctgcaaacagttcttccggaactgcacagcttgtatattcgtgttttggttttccacattctgcaacgattgtctcgataaatgcgattactttctgattcagttcgtgtgctgcaaagatggcatcgatcatctgtgcctccggaacttcgtttgctccggcttcgatcatgatcactttctcttttgtggatgcaactgtcagcgccagatcggatacttctttctgtgctgctgtcggattaaatacaaactctccgccaaccagaccaacctgcgttgtagaaatcggtccgtcaaatggaatatcagaaatactcgtagcaattgcggcaccgagcattgctgtcagttccggactgcagtcctgatccacagacatcaccagattttccagtgtcacatcatttctgtaatctttcgggaacagcggacgcatcggtctgtcaataacacgacatgttaaaattgcattttcagaagcttttccttctctcttattgaatcctcccggaatctttccaactgcatacaatctttcattgtactctacactcagtgggaaaaagtcaatcccgtctcttggtttttcagatgctgttgcagtacaaagaacggttgtatccccgtagtgcatcaaaaccgcaccatttgcctgctttgccactctgtcaacatctacgcgcagagttcttccggcaagttccatctcaaatttcttatacataatattctcctttttgtcttaaaaacatttcccgggacaagcgtctccgaaactactgaaaaaaacaccgaaaaccttcgatacccttttcagtggtctcgggtacatatacttgtccgcaatcctaattattatatcatagatagattagaatcgcaagaaataaaaagactcctgcctgccgggtcatccggcaacagcagaagtctcgcttccatgaattattttcttaatccaagtttttcgatcaaagcacggtatctttcgatatctacttttttcaggtatgcaagcagtccacgtctctgtcctaccattttcagaagtcctcttcttgagtggtgatcttttggatttgctttgaagtgatctgtcagctcattgattcttgctgtcaggatagctacctgtacttccggagatcctgtatctccttcacttcttccaaattctgcaataatagcctgttttttgtcttttgcgatcattgtatgatcctcctttaatcttaataataaaccgcctggcattaagtaatggtcggagtatccgattaccgaacaccggctgaatcctaaggtagtataacacagggattttcagatgtaaagccctattttttcagttcaatttttaaaactgtgtccagttcatccggaagcggatagctgaataccggattttctccaagcgctacaaacggtgtgtccgaatacattgccgtattccacgcctcccctctttgcacctgagcaccgctggaaagaaatgtaaccgttcccaactcatctggatggattccatacaatggaagagctccaagcggtgtttcataaatatgtgcatacacggtattttctttctgtgtataacgtccccattccggtttctcatactcggaaattccacacccatagagactttctccgtttcgttccatccactctcctacctgaagcaaaatttcccggctttcttttggaatacttccctttgcatccggtcctacattcagaataaagtttccccctttgctgacacattctaccagctttcggatgatcgtctgcggcgttttataagtatgatcataatagcagtatccccagtggttattcatggtcgcacaaagttcccacgggattggttttccattgagatctttcattcctcccggcggaatgatcatttccggacttgcaaagtccccgctataactgttcggatgatccgtcacaatactcccattcttttcccccgaaccttccagacggttgtcaatgatcacatccggctgatgttttctgaccatgcggatcagttcttctgccttccaggtatcctcacacatattgtcgtaggaaaagtcaaaccagagaatgtccagcttcccatagtttgtgaccagttcttccacctgtccatgcatgtattccaaataccgttcaaaatgaatctcttcgtctttatacgcctcatttccgcgcattggatggtgcatatccttgtattttggataatccggatgatgccagtcgatcagtgtaaaataaagtcctacttttaatccttccgcgcgaaacgcatccagaaattctcttaccaggtctctgcccgcttttgtatttgttgctttatagtctgtcagtgcagaatcaaacagacaaaaaccatcgtggtgttttgcagtgagcactgcgtacttcatacctgcttttttggcaagcttcgcccattctctcggattgtaatctattggatcaaactgctcgaaatattgttcgtattcttctgttgtcatccgcttttcagacatcacccattcgcccagtgccggaattgcatacagcccccagtggatgaacattccaaatctttctttccgaaaccattcggtccgattccatatttcctgattcattcttattttccatatcctttcatttcatacacagtaccattgtgttcccgactttcctctgcggccagtgccatcagatggctctctatggattccgatgcagcacttacactttttgccgttccaccgcctgccaccagttccacaaagtctttcatcatggagacatcacttccactgtgacctccttttgggatcttcacctgaattctggtcgtatttccagacgcaaaatcttctaatacaatttcattttcttccatatttccgcgaatctgccccttggttcccatcaagttgatgatccgttcacatttgtttgtaaatgcacacatggtcagactggctgtcacaccgttttcgaattccagatttacaatctgatgatccaccacatcattatcgcaatgatacacgcatctcccgtatggtccatcttttaatgcatccagcaatgcgttcttgtctgtctgaagactgacgactctggcaaatgttccgcctttttcctccagatcttccaaataaaatcgtggtgcaaaatacggacattcgtctctgtgggcacatccgtccagacagtagtgcggagcgccttccggtgcattttcctgcttaaaatgcatcagattcccaaagcttcccagccttgtgcaggatgcccctgcaagccataataaaatatccatatcatggcagcacttctgcaggatcatcggactgcttaaagatttatttctccagtttccccttacaaaactgtgggccatatgccagtatcccacactctcaatatgctggatgtccacaagctgaccgattgcaccttcctccagaagtcgtttcacttctctgaaaaacggagaataacgcagcacatggcagatactgatcactttatcataatttttcgcaatttctccaatttcgatgagttctgatcttaccggggaaattggtttttcacataatatatgatatcctttttccaccgccagtttcagtgcctcgtagtgcatctgatcctgcgtacagatcagaacgcagtctgccattttcggacggttcaatagctctatatccgattccaccgcattttccggaataattttatgaagtttggcaaattcttctctgcggtcttttcttggttctgctactgctacaaattttagttcatttgggtaatccagcgcataagaagcatatgcttccgcacctctttgtccggctcccaaaagaatcgctgtcacttgtttcataattcgtcttctccttttagccttttactgcaccgccggataaagcttcgataaaatgtttgctgaaacagcagaacaaaattaccggaggaagtaagatcacgacgatcgcagaaaacattccgttgtaatttgttgaaaatgcattctggaactgtgccagaattgcaggaacagtctttaactccttcgtagtcaacaccatagatgcccagtaatactcattccagtaattcataaacgccagcattgctgctgtcaggattccaggacgtgctatcggcagcataattttaaaaaatgtctgcgtgtatccacatccatcgatccgagctgcttcttccagctccaccggaatcgtcagaaaataatttttgatgaccatgaagctgactgcaataccactgcatgtataaatcaggatcaaaccggcatgactgtcgttgattcccatactgttgaccagattataaacaggaaatgtcatggctgtcggcggaataaacaatgtggacatcaacaggacactgactgtggatttgaatctgaaattcatccgtgccacaacatacgccgacatggaaatcataataatactcagtacgaccgaaatacccgccactttaaagctgttaaaaaagtaccgcaggatatgcatatccctgaatactccaatatatccatcaaaacaaagttcgctcggcagagtaaatccaggctctgccagaggatctgccttcaacgaggaaatcgctacccaaatgactggaaacaaagagatgacacacaccagaatcatcacgatatatgaaacgatttttccaaaagtccccactccatggaccgcttcattttcttttccttttttctgtctgttcatcatcttgtgcctcctttctgatgttttctttcacggaacaaaaggttgatgattaaaatcaacaccagtccacctaaaatctggattgtaccaattgcatttgcacgtgcatactgtgctctcggactgacaacggccagctcccggatcaggaagctgatactctttgttcctgctgctccgttggtcaggaaatacacttcattgtatagcaggaagcctgcagatacggacaggatactgatggtcttcaaagtatccttgatcagcggaagaataatgcagcgatctagcgtccagccctttgccccatctaagagcgccgcctcacgcacttcctccggaattgcagaaatttgtcccagaaccatgatcatattggttcccgcaaaaaagatatatgcacacgtcagtgcaatcatatttacctttggtataaacaggacattatcctgaaaattcggtacaaatatgcggatgatctggttgatgatcccatacttcggattatacaactgcaagaagatcaatcccattgcagcagaagaaataatattgggaatgacatagatatttcttgcaagcttccagcctctgcatttcttagagattacaagtgccacgcctgttgcgatcggaacctgaatcaaaaggccacacaatgcccagattgccgaatttcgaaggccttcccaaaaatatggatatttttcaaaaatatatgtatagttatcaaacaaatgtccggcggaatacatttgcatatcattcaaattcgtatagtcccattttgcaaaagaactaatgatcacagttaagatcggatataaataaaacacacaaaagcataccagagttggtaaaagaaagaagaaaataaacagattctttctcaacttttgtttctttccggttgtttccattttgctacctcctactctggaaatcttcataaaaaaggaggccgctccttgataagctttctgcaaagagcagcccccggcatatacaattagccgatcagaccgatcaactcactttttaattcttcaaattttgcatttacatccactccggaaaccgttgattcgatcagtttatttccgattgcgtttgcaatatctgttccccatgcagaatcaatggttgcaaccacatactctgcatcatttgcctgagagcatgcctctgcaagaagttttgtcttctcatctgcaccctctgccaatgcattgagatccagtgttgttgtacatggatttgcgcctacttctttgaagatttttgtctgtacctcatcgcttgtcatatattttacaaattccaatgccaggtctttttccgcatcactcatgccatttgctgctgtaatcccgccgcttgcagacgataaggaaacacttcccgggaagattgcaggtttgaagtttgttgtatcttcaaatccgccggctgcccatacaccattgaagaaaactgctgactgccctttgttaaaatctgctgaccagtcatttgcaccatcgtctgcgttgctgctggcatttgcagatccatttttctgatccatacccgcaaccaacttaaatgcttcttcaaattctttggattcaattgcttcctctgtcagagcttctcccacaatttttcttccattttcagacatacccagaatcgcattaaagcttcttgtggatccctgtcctgcaccatacgcgtatacatttccgcccagagaacgtactttttccattgctccttcaaaatcatcccagcttttccatgtatccggtgttcctgcgcctgcatccttcaatattttatcgttataccaatatcccaatgtcaaaagctgatcatgtacagtatagatctttccatccacatcattctgtgtgtagttgattccgacattttctttgatgccctgttcatctatgtatggtttcatgtccagaagaagatcctggctgattgccgccagagatacggaacgccccgcaagatccaccatgtccggatatcctccgcctgctactttattctcaactacgctgtcaatatcttctgtcggaattgctttgaactctacttccccatctgcatgttcttttgcaaattcgtcataaatatcacgcatgacctgagccggtgcccattcgctcgcatcctgataatacccgtgataaaattccagcactttatcgtcggatgcttctgttttcttgcttcctccgtctgttttttccccttcggactttccacatccggaaacagcgactgttgccaccattgttgcagccaaaatcaggctgatgattcgttttttcttcattactaaatcctccttcgatttcctgttggacttagaatatcacgatcatcagcctgactctatggatagaattgaccctttcttgcactttttctggtttttcagagtcaattttctgttttttgtaatatatttatgattctgccgttttcttgtaatttatttacctgttattttgtcatattgacatcaaaataaagatatccgttattatttactgtaataactgcctgttttttctgtggatcgtattgtacctgcggcatatcatatgttccattcaatcctgtcacattttcgataaccggtgtctgctctacctcttttaacacaatcacagaacttcttctttccccattctttgtatgattgatgtaatgctcatgtacccatgtcaaagcctcatcttttgacatctgcggaagtttttttgcttcttctgcattggttgctccttcccacagttcctctttattcgtacggtaattattcagacgtacttctattttggagtctttcccgtggagtatcacagatgtatgtggatctagtgtgacatccgcatacacctcttttccattcgaaagagacagtttcatatcggttcctgtttgttttacattctcattatatttggagttgtacagataccaacggttctccagtttctgtgcaaacagatcccctgcatactcctgcggatacaattcattcaaatactgttgttttttctctaatgaagaaagtctttcatcctttccatccacaatctgcacactgctgctttccagtgcctgttccaccctgcttctatcgatcactgccggaactgccggaatatttccataacgtccggtcgtataaagcggagactgtgccatttctgtgatcagccctgcaaaaaattcaccatttcccatctgcgagaaatttccatggatcaaagtctttgttttcgcaaggatctcctgttttgacggtgcaggattctgtacaatataacggaaaaattcctgaattacatttgcataaagcggagattgttcattgcgtactccataagtgtaagccggatgctcaaaattgtatacgcatcctccattcagataaatcatcattgcttccatcccgaccattgcttccggttctgtcagccattgtctgtttccctgtgattttccaatatttccatctgcaaataatttccattttccggtctcataccacttccaggtatccatcaggccaccccactgataggtatgatccgtcagccacaatcctgtcatgtaactgctggtcggtgcatcatttccctctgcagccggagtatttttatacatgaaaatcaagttttgccagtatttttccactgcttcccgaaacgcagtctgtccctgcgaaccaaatgcccgttcaatagaacctccgttattctgctctgcccagataaaaaatccgccatgttttgctgacagctccagatattttgctgccatgttttctaaatttgcagtccatacccagtagttttctgtgctgaaaatgccctgcagacaactatatttcgtatacatctgatcgatccactctgttgtcagccagtgagtcgctgtatattctgccgcatttcccgcagtaaatacagtcagcaccaccgggatcggctcattttttcctgtcttgggatctatataattctgtgcctcttccagataatgttcataaaaatccgacgctgtcccttcccttttcggaagatcatccggatgaagttcaatcacggtatatggttttaaatcatctggaactgtttcccactttccagtcagagtatcgtcaccccagaatccatattctccccgctcatatttcggaccatgcgcatataacgggatgatcatcagcggatgttcattggaaatttctcttcgtttttgtgccggtacccactctcctggtttttgaaaggttccggatgcggtaaattttgcatctgcatagaccacttcatcgccccatgtctgctctccggcataacttttgagctgaaactgttttgcattttccgggatatccagattcacttcaattgcctctgttctgacagatattccgttcggatactgttcctgtgtggtatacagaactgtatcatctacgactacctcaatcttttctacgttcgcatacccttcctgcgctcctgtgccggcatcgattccgaaataagcatggaactttgacacttttgctccctcaatgttatatgtgatcacagacggcgaagctgcgactgttccaatccctttgtcaaaacttttgatttccccacctggcattgtcagactgatttttgcatcctgtccgttattccccaatgtaaacggatgatccttttgtactgttttctcctgataggcatccccgtgtgttgccgatacccattccagatctgacagataataatctttttgttcctgcgcacgcacttccattccggaaggcgccactgtggagatcagcactgctgctgtcaaaagccccacaacttttctcatgattgttcccatacttcaagtttctcctctcatttgattttaccggccgaatcgtattccatggttttacacataccacggatacagatattctaattcatacggatttcctgtaacatgaaatctatcaaccaaaatatggagaatatttacttttttcgttttttttatggtattttgttatccattgttcgccgtcttattaaaaaaacgccataccacttgtgatatgacgcttttgttattgatataactggatataaaactgttcttcttcaactgtttgtcccagcacttccataatctgatttcggaaattctccaactgactggtggtccagagattgtccggaacttcaatgatgcggtctgccccgcggattgcctccaccgcttgacacattctcggaatctcttccctgtaatcatccagttgaattttcggactggaaggcatctgcccggtttccagaagaatccttttctgtacccgttcgctgagcatatattttaagaactccacactggcatccattgtctcctgattttccgtattccccacaatatatccaaggcataccgaagagctggcaatcgtactgccgtcttttcccggaaacggcgcatagcaggcattgatcttttcatcgatcaattttccggcccacactccgttgatgtacatcgccacgttcccgctgttaaacatacttccctcatcccggtagccataatttctgcccgtactgtccccgtactgcaagatttgtttcatcgtttccagaacagaaaacagatcttcttttccaaggatcatcgcatgattttcaaccgcattcttcgcatcctgtgaggtatccaaaagcagtgcatctgccagatacgcactgttttcttttgtaatctgtaccggaatcacctgttttccttctgcctgtgtccatgcctgtatcttttcgcaaacttccagaaattcctcccatgtctttggtatctccgggatccctgcttttgcaaacagatccgcattgtaccagtagcctcctccaagcagcagcacatctgacacagtgtaaagctttccgtccttttgccagtaagaaataatctccggcgccacacattctgcaaaatctggatcttcctccaaataaggcatcagatccaccgccttattcttctcttccataaactgatacacggaatcttttccatagccgcctgtaaagatcagatccggcacttctcccacagaaagcatattttttgtcttctcgatcacctcattggaggaagtcatagacatcagattcagcttgatctccggatgttctttttcgaaatctttataaatctgccgcattctgacatgttccggttccatggaaccccatccgtgtatcagtgtgatctcggtctgctcctgctccttttttccacagctgcacaacagacagataaccaacgtcagtgtcagaatccaccttgcttttttcatagattttttcctccggactgttcatattctttcggaggacagcctgcatattttttaaatacttttgaaaaatatgcagtgtcttcaaatcctgtcaatgccgcaatttcgtaaatttttttgtctccttttatcagcagttcctttgctttttctacacgcagagaattgatcgtgtcaaacagattttctcctgctttctgcttataaaaacgactcagatagctggcgctgacatgtactttttccgcaatatccgccagcgtcagacgttctgtataatgatttcgaatataagtctgcacacgtttcaaaagtgtatccgcctcttcttctgtctcctgctctttcggcacaatgaagatctgattcccgttgtctgtttttcccttgccatatgcctttgtctgctcataaatgctggtagaatcttccccctgctgataggaacgactgcacaggatctgtggaaattcccccagaaaatttttacagaacgcccgcattttttcacagcagtttaaaatctcctctgtctgctcgctgtccttcacggtaaggatcagcccttcttcttcgctccccggagataatgcacgatactcaaaagaatgaaatgcatgaagaaagaacttccgaaccttttccccctgatgcaccggtgtcaccaaaatcatccgataccatgtcatcgtttcactctccagacgctgtttgatattctcgatcgccactggaatttcttccagggctgctgtcttcacaatgtaatcgctcacctggtactgaatggcttttcgcgcatactgaaaatctgcatatgccgtcagaaaaatcacagaagtacgaatatgatttttataaatatactctgcgacctccattccatccatcagcggcattttgatatcaatgacggcaatatccggagcgtctttctgaatctgcgcaagcagctcctgtccgttttgggcaacataaaccagttcacacccaagctctccccaggggatcagcttttccagcccttcccggatataaggctcatcatccgcaatcatcactttccacatgactttattcccccttttccagcggcagccgcattgtcacacacgttcccacatccggtgtactctcaatttccatagaggcctcgtttccataaatggtatgaagcatctgctgtgtattcgtaagtccgatatgtgtatgcttttcatctcctgcatcctgccatttactctttaacttgttcacgtcaaatccaaccccgtcatctttgacctgaatccataatttcccgtcctcttttcgtgcttctacctgaatatgaccactgcccggttttggttccaacccatgggcaaccgcattttccaccagaggttccacactcagacgcggaattcttgcctcttttacttcttcactgcaaaagatatcatatgtaatctttcctgtaaagcgttctctttgcaggagaagataaaattcgatcagttccatctccttaaacaatggaatttcaatttctccatttcggaaaatctttccctggatcagtcttgcaaatgcacttaacaacttctgaagttctttgtttccctgcagtccggccttcatactgagcatggataacacattgaacataaaatgcggattgatctgagactgcaaatatctgacttgtgcctgtgttgcgagaagctgtttttcatagacctctgtgatcagatttttaatctgtcctgtcatttcattaaaccgaagactgatctcatcaaattctcttgtgtcaaattcccgcatctgtgcatccagatttccatttccaaactttcggatatcctccccgatcagctttaaaggccgggtcattcgaatagaaataccaaacacagccagagtggtaataccgatcacaagcaaaaaaatcagtgcaaacggctgcattgcagagcggatcgatgcatagatcagatttttggggagtatcatcttaagctccattccaaaccctgtctttcctccataaaacagatttttctggttttccatcactacttcactgctgccgaatttttgaatctgcatcagctgctttgcctgtgttctgcctttttcatttgcaaacaaaatctgtcctttttcacctgtgacgagccatcctgcgcccggatattgttctgcttttgcaaacagagcatccacagcagcctttccgatagaaagaatacaacaaccagactcttttagttcctcattgtatacacgcatacacacatacgtgcgttcttcctgtgcaagataccagtattcattgctgctcttcaaaaagctggcattgatttctttgtaaatctgattctgcaattctatattttccacagtctccgggtagaatcgactgctcagccattctcctttttcgttaaacagatagatacaatctataaacggagaggaagaatccaccatattcacctcagaaaacagatctgtactgtttacgaattgttctcttgcgtcttcctggtcgtactctgtcccctcgataaaatgcttcagaacattattatgccgcagggcaatcaccatattttccatatttttgatccttgtgtcaaactgcccgcttgtattctccagataaaattccaagtcagaatatgcctgtctggaaaaatgaaaaatcgacaatgcgatctgggcaattcccaggatcagggctgaaatgatacaggctgataaaatcagaccaatcagctttgtacggaaactgggctttcttttttcttttttcattgatcacctcatcactgagtctgaaaatactccataccaaataaaagatctctgtccacctgatttttcagttcttccagagacgaaaatttactctcaggcctttcaaatgcacaaaactcaatttctacatgctttccataggcatccccttgataatcaaacacataaacttctgtcagaagtctcttttcttctgtcactgtaggtttgatcccaagatttccgattccgtggtaccagattccatccattttcaccctgcacgcataaaccccgaatcttggtgctgttttctcccgctgccatgctacgttcaaagtcggaaatcccagcgtcctgccaagttgtcttccatgttctaccactccgtctgtacgatagcgatatcccagaagttcctccgcaagttctacattcccgtttcccaacgcctcccgaatgtacgtactgctgatttcccggtttcgatacactgctttctctaccacttccagccggtatccatactgctttgcataatgctgcagcatatgaatgtctcctcgcttctgatgtccaaaatgaaaatccgtccccactgcaatatacgctgcatgcagctgctgtaccagaattttctctatgaattcttctgctttcatctcgcggatctctctggtaaaaggacagatgatcagcgtatcgatctcattctccagatgcgccctcttctccttttgcgtcatcagtgcctctctccccatatcgaatgcaaagacaacgctttccacctgctcttcatctgcatattgtttgattcttcgaatcagttcctgatgacctctgtgcagaccatcgaattttccaagtgtaacggctgttttgttttcggtctgatatctgcttaaatctgttacatagcgcatagttaccctcttatttcttcctgatccagaaacattttttccaccttcagcttctttccgttttcatccacacgaaaaataccgataaaatgatgttttgaatcgtatacacgtattctttcttgtttcttttcatccggcacatattccaaaaaacgaaccggaatttcgtttccgttatatgcaagagcctgcccttcttcttttactgtcacagccggatatttgaaaaacaccgtatccagcggcatcagaatttctgaaaactttccctgctctttcttctcctgtatctcggaaagcttcaggctttcctgaatctcaaattggctcacctttgtgcgcaaaagtgattccatacatccaaaacagccaagtttctcaccgatatcatgacacagtgtgcgaatatacgtccctttggaacaggaaacttccattttcacacggggcagggaaatttccagaatccggatgtttttaatttctactctgcggcttttgcgttcgatcgtctttccttctctcgccagctcatacaattttttcccatttactttcaatgccgaatacatgggaggaatctgatcatattctcccacaaagctcatcacacaatttttcacctgttcttctgtaagttcctgtgtttctccttcttgcagcacagttccggaaatatcctgtgtatccgtttcttttccaagcagcagaactgcttcatatgtcttatctttttccgtaagcatatcgcacactttcgttgctcttcccaaacaaacaggaagcacgccttccgcatccggatccagcgtgcctgtgtgtccaatctttttctgtcctgcgattccccgcaattttgctacgacatcatgggaagtatatcctttttctttatatacattcagaattccgtttatcataacaattcctgtctttcttttttatgcctcatttaactgcagcacaatctgtccaagcagattgttgatcacatcgtgtgccgagcctttcattgtaactcctgccgcacgtacatgacctcctcctccaaaatactgggcaatcctgctgacattcacctttcctttggaacgaagactgactttatattcctgtgtatcaatttcatgcaggaatatcgccacctccacgcctctggtctgacgcagctgtgccacaattccttccagatcacttggcaccgcctcaaaaaattccatctcttttctggataccacagagaccacaacttgtttttccagaaccagcatactttccagaagtgctcttccaagaatctgattttggatataagttttctcaaaataggttttttcaatgatctcacttccattgattccttttctgagaagctgtgctgctgcttccatggtttccggcgaggtacaagaatactggaacactcccgtatcatgtgcaattcccatatacagcgcttctgcacacgctttactgatcttttcatcatccagcagtgtgtagaccagttctgaggtagaacttgcattcggacaaatataattggtctttgcaaaagcatcgttgctcacatgatggtcaatacacaaggtatctgccgcctgatgaaacaacgcagcaaatggtccaaggcgcttctcgtctccacaatccaggcagataaacagatcatatgcctgatcctgcggcagcgtatgtctgatttcttctgtccgcgcgatcaaagaaaaggaggccggtatctcttccagatacaaatctgtctcaatctccggaaactgttctgtaagatagaggtaaagccccatggaagatcctacacagtctccatccgggcggacgtgaccagcaagtgcgatccgcctctttccttttaaaatatcagataatacgattttcatacctgcctattcatcctcactttttaaatcttttgtcagatcattgattttctttgtcatgttcacaccgtactcaatagactgatccataataaaacggatttccggtgtgttgcgcatgttgatcgttctggccagttcacgccggatatatccttctgcgctctgaagtcctttgatcgtatcttcctgggccttcttatctcccagcacactgatatatgctttgcatgtcttcagatcaggtgctacttccaccgctaccacggaggtcatcggcgccactctcgggtctttgatgcctccgcgcaggatgttgctcagttctctttggacttcagtattgattcttgtatttttaatactgtttttcctcataactgctccttattttctctctacttctaccattttatatgcttctaccaggtctccctctttgatgtcattataattctcaaacacgaaaccacattcatatcctgctctgacttctttgacatcatctttaaaacgcttcagagatgccagcggtccatcaaagatcacaataccatcacgggtcagacgaacagagcagtttctctcaaatgtaccatcctgaacataagaacctgcaatggttccgactccagatgccttgaatgtctgacgtacttctgcgtgtccgagtactttttcctcaaatacaggatccagcattcctttcatagccgcctcaacgtcttcaatggcattgtagatgactctgtaaagtctcaggtctacaccctcacggtctgcgatttcttttgctgttgcatccgggcgtacgttaaatccaatgatgatcgcattggaagcagatgccaggatcacgtcagattcattgattgctccaactccaccatgaatgatcttgatcacaacttcttcgttggaaagtttgatcagactctgtttgagcgcttctacagaaccctgtacatctgcttttacgacaatgttgagttcttttaagttgccttcctgaatctgattgaacagatcatccagagacatcttggacttcgtctcttcaagcatcttcactctgtgctgtgaaatgaaggtctctgcaaaacttcttgcctctttttctgactcacatcctacaaacacttctcctgcctgcggaacttcattcagtccaagaatttcaaccggctgggacggacctgcctcttttacacgtcttccccggtcatccatcatggctcttacctttccatgtgcagatcctgccgcaatcgcatctcccacatgcagtgtacctttttgtaccagtactgttgcaacagaaccttttcctttatccaactctgcctcgatcacaagtcctcttgccacacgatttggattggctttgagttccattacttccgctgtcagaagaaccatttccagcagatcctggattccttcttttgtatgcgcagataccggtacaaagatcgtacttccaccccagtcttccggaatcagttcatattctgtcagctcctgttttacacgttcgatgtttgcacttggtttatcgatcttattgattgcaacaataatctcaattcccgctgctttggcatggttgattgcttccactgtctgcggcatcacaccgtcatctgctgcaactacaaggattgcaatatcggtagaatttgcacctcgcatacgcattgcagtaaacgcctcatgtcccggtgtatccaggaatgtgatcttttctccgttgatctccactacggaagcaccgatatgctgtgtgattccacccgcctcacggtctgtcacactggtatcacggatcgcatcaagaagagacgtttttccatggtcaacgtgtcccatgacacagacaaccggaggacgtttcaccatcgttgcttcatcttcttcctcttctttgagaagctcttcgatcacatcaaccacttcttctttttcacagagaatttcaaattccattgcaatctcttctgctgtttcaaaatcaatttcctgattcacagttacgatcttgccctgcataaacaatttctttacgatagcagacggtactactttcattttgtctgccagttcctgaattgtcagtacctccggaattgtgatctgtttgatttcttcttcttttttcacttccggtttcggctgtggtttctgaacttctaccgtcggtttttgttttctgccttttttacccttgctttcaaatccttcttctctgttttcttttttcttgtaatctttttctttgtcttttgccttattccgctgtggcttctgctgttctaccaatggtgccggaatcgaatttctgtcgtttctgtcatttctgtcatttcttctggaatcctgacgctgtccgcctcttgttccttcttccggacgacggtttcctctctctctctgtccattgttcggaccagaagccggacgctgcccgtttcttccgcctgtcggacgatcctgacggaatccacctctctgcccatcctccggacggcgatttcctgtcggacggccttcctgcggccttctgttttctccgtttgcctgcggacctcttgccggacgttcctgtcgggagctgtttgccccggaagccgggcgctgtccacttccgtttcttgttcctgccgggcgttcctgacgggagcctccctgtgcgttctgtccatttgccggacggtttcctcccggacgacgatttccgctcttggaattctgcggacgaaatacctgtacgatatttttcttctttggtgtttcttctgtttctccttttcctgcacgtttactgcgcagctcttctacgatctcatccggaattgaactcatcgaagtcttcacttctacgtgttttttctccagaatatccatcagatctttattttccattcccagctcttttgccagttcatgcactcttaatttcgtcatactcaaactacctcctctatgcaatcgtattattttttgtttccagttgctttcgaattccttttgcaaatccttcgtccaatatcgccagagatgcacggaactcttttcccattgcatgccctaaggtatctttatctccgtaaaaataaattggaacctcataaaactcacacatatcccggaattttttcttggtgttgtccgatgcatcctctgccacgatcacaagcgctgctcttcccgattttgtttcactttctgtcatgaactcaccgctggcacacttcccagctttcgtggccaacccgatcagggacaatactctatcttgcttcaaattgttccatctccttttccagccgttcatatacttcctttggaattgcctgcttaaaggaacgttccagccctttattttttactgcctttccaaaacattctctggaaacgcaaacataagcgccccgtccattttttcttccggtcgtatccagaacaaattctccttcttctgtcctgagcactctgagcagttcttttttggctttcatttctccacatccgacacacttgcgcatcggaactttctttttactgttcaaatacctcacctctccaaagagtctattcttcgtctgtctctacaaactcgatttcttcatatgcatctgcatcttccggatatccgtctgtataatttgcagcttcctcatattcttctgtatatccgtcatcttccatcatattcatctgatccatataatcttctggaagttcccctgattcgatcgcctgtgtctcactcttgatatcaatcttatatcctgtcagacgtgctgcaagccttgcgttctgcccttcttttccgattgcaagagacaactggtaatccggcacgatcacacttgccactttttcatccggatctgccataacagagataacttttgcaggacttaaagcattttcaatcagaagcgccgggttgtcactccagttgatgatgtcaattttctctccccggagttcctctacaaccgcattgactctggcaccattcattcccacacatgcgcctaccggatctacgttctcatcattggaccatacagccattttcgtacgggatcctgcttcacgggcaatgcttttaatctccacggttccatctttcacttctgccacttctgcttcaaacaaacgttttaccagttcaggatgagtacgggaaacgaggatctttggtcccttcggagtattcttcacttctacaatatacaatttgatacggtctgtcggtttaaacacctctcctttgacctgttcattctctgtaagcatggcatctgcttttcccagattgacactgatatttttgccaacataacgctgtacaataccggttacgatatctttctctttctcaaaatactgatcgtatacaacttttctctcttcctcacggattttctgaagaatcaggttctttgcattcatagttgcaatccgtccgaattctttggactgtacaggaacctgacaaacatctccgatctgcagtgcagaatcaatcttttctgcatcttccagcgtgatctcgattgccggatcaaacacttcttccaccacttctttttctgcataaactgcataatcacaagtctctctgtccatgatcaccttgatattatcggatgttccaaagtgatttttgcaggcactgatgagagaattttcaattgcatccatcatggtatctctgccgatgttcttttctttttcaagaattgtcaaagcttccattaattctgtgttcattgtttcatttcctcctaatttaaaaatccaacgctaaacggataagtgcaatttcacttttgtcaaatgtctgtgtgctttcatcttcataagaaatggtcaccgtattctgatcaaacgctttcaaaatcccgacaaattctttttgtctgttgatcgcgcggtacgtacgaatctctacttcctgaccaacactccttataaaatctttttcttttttcaaaggtcttccaagacccggagaactcacttcaaaaatataggaatcttcgatgtagtccttctcatccagaatgtctgaaaatcttctgctcaccacttcacagtcatctactgtaatcccgcccggtttgtcaatgtatgcacgcaaataccagttcccggcttcttttacatactccacatccaccagttcaaatccctgttctgccacaatcggttctaagagttcttctgtctgtttttcatattcttctcttcttgacacgtcaaacttcctttctatctcctgtttcttgttctctccaactatcgttatcttctcccgcatcactgcatgatatgtaaactccctatcatacaaagaagagtgaactttcgtccactcttctgccggattgtttatgtaactgtatacagtatagcaccattattctgtgaaagcaagggatttatactattttctctgctttgttccaacaccatctctttttgccagcttcagccggttcaatgtcacttctttttctccgtatttcacttttgtatcggttccctcttcaaacagatgtatctgctccagctcgtccattttctgcagtttgatcccccggacaccaaccgcgccctttttcttttccgggatctctgccgccggaaatcttaagaaatatccttcccttgtctgcagtacgatattctgattctcctgaaccattccaacatggatcaatgcatcttcctcctgcagcttggtcgctgcaatggttcgttttgccacctgaaattcactgccgtctacacgcttgagcattccctgccttgtagcaaacaaaagctttccaaatgcagtccgctgcgcatcacagattgttacaatctgctcttcactgctgctgtagttgctcacattgtcaatcggaactcccttatcccggaatcttccatacggaagatccatcacctttacctgatgcatcttcccagtatccgtaaacagacagagctttccggtattcagacagtgtacgatatacttattctcactgtctgccgcctctttgtttctttcatatacactgacatccactgttttcgcatatccgaatcgatccatcaaaaagacaacttcctgctcttctactttcttttcttcaaatacagcttcctcggcattttccactgctgtgcgtcgttttcttccgtactctttcttaaatgcatccagctcttccatgatcaggcttgccatggaatcgtaatgattcaaaatgtcttcataacgggcaatatgtttcaaagtcatctcatgttctttctgcagcgcttcaatctccagaccgatcagcttatacaaacgcatttccagaattgctgatgcctgtctttccgtaaaccgaagcattgctgccatttttttcgaaatctgagatttaaaccggatattctctgtcaccccctgtgtcagacatgctttggcatctttcacagacgtactccctctcaaaatttcaataatcagatcgattacgtcacacgctttgatcagaccctcctgtacttcttttttatccagttcttttgcaagcagagttttatattttcttgtagtcagctcaaactgaaaatccacatgatgctcaatgatcgcctttaatcccagcgtctccggtcttccgtttgctacagccagcatattaactccaaaggtgtcctccagtcgtgtctttttgtagagcatattttttagattttcgacatccgcaccttttttcagttccagcacgatccggattccttctttggatgactggttggaaatatcgacgatatccgtcgtttttttcgtttccaccagattgcatacatcattcaggaacttcccgattcccgcgccgatcatcgtatatggaatctctgtgatgaccagctgctttttgcccccttttaattcttccacttctacttttccgcgaattttgatctttccttgtcccgtttcatagattgccggaagatcgtcctgattgaccacaatcccacccgttggaaaatctggtcctttgatatatttcatcaactgtttcgttgtaatggcatcatttttcatatatgccttcaccgcatcgatcacttctccaagattgtgggtcgggatgctcgttgccattccgaccgcgatcccttccgctccgttcacaagcaggttcggtacccgtaccggaagtaccagaggctctttttctgtctcatcaaagttcggtccaaaatcgatgatatccttatccagatctgcaaggtatgcctcctgggtaaactttgtcagacgtgcttctgtataacgcatggcagccgctccgtctccttcaatggacccaaagtttccatgtccatctaccagcaccattccctttttgaactcctgtgccataactaccagcgattcatagatggagctgtctccatgaggatgatatttacccatcgtatcccctacgatacgggcacatttccggtatggcttgtcataacggattcccagttcatacatatcataaagtgtccgtctctgtaccggcttcagtccgtccctcacatccggaagggcacgagatatgatgacactcatcgcatagtcaatataggatttgcgcatcacatccgagtattctgttctgattatctgtgattcactgctcattctcttttctcctctaagcctgaacttctactaaatatccagttctgcttctgttgcattttcgtagataaacgcccttctcggcggaacttccgtacccatcagcatctcagtcacgctggaagccattcgggcatcctcaatctccaccagcttcagcagtcgtgtctccggattcagcgtcgtttcccaaagctgatccgcatccatttctccaagacctttgtatctctgaagcgtaaatccgccgtcatgcgttttccggtatttctccaatgccttgtcatcatacaggtactcttcctccccttttttcggcattactttataaagtggaggcattgcaatgtagacatgcccctcgtagatcaattccggcataaaccgatagaacaacgtcagaagcaatgtagaaatatgggcaccgtccacatcagcatctgccatgatgatgatcttgtcatagcgaagcttcgtaatatcaaaatcattgccgtatccttcagaaaacccgcatccaaatgcattgatcatcgtcttgatctctgcatttgcaagcactttgtcaatactggctttctccacgttcaggatcttccccctgatcggcagaattgcctgataattccggtctctggctgtttttgcagagcctcccgcagaatctccctctacgataaaaatttcgcactttttcgcatcccggctttcacagttggccagcttcccattgctgtcaaaagaatatttctgctttgtcagaagattcgtctttgccttttcctctgtctttcggatctttgccgccttttctgcgcaggataaaactttcttgagtatttctacattccggtcaaagtaaagaacaatctcatcccccgttacttttccggttgcttttgccgcatccgggttgtccagtttcgtcttcgtctgcccctcaaaccgtggatccggatgtttgatcgaaacaatagccgtcattccgtttcggatatccgctccggtaaaattcgaatctttttcttttaaaataccaagttcccgggcatattgattcatgacagttgtaaaagtcgtcttaaacccggtcagatgggttcccccctctgcattatagatattgttgcaaaatcccagtacattctcatggaactcgttgacatactgaaaagcggcttccacctcgatcccctctgctgtccctttgaagtagatcggatcatgaagcacctcttttttctgattcagatcccgaataaatcccaggattccatccggctcatgatattcgatatgttcttgagaatccggacgtttatcatcaaatacaatggtcagctccggattgagatacgccgtctcatgcaggcggcttttgacttcttctgcacggaattttgtcttctcaaaaatggtgtcatccggtaaaaagttcacccttgtcccggtttttcttgtctttccgatctttgggagaagcccgtcttccagttctaccaccggaattccacgttcataacggtcatggtgaatgtatccttcccgactgatctgtacatccatataaatggacagcgcatttaccacagaggatcctaccccatgcagtcctccgcttgtcttataagcactgtcatcaaactttccgcccgcatgcagtgtggtatatacaaggcgggccgcagaaattcctttctgatgcattcccacaggaacacctcgtccatcatcttccacagtagcagaaccgtccttttccagtgtcacatgaatgtttttacaaaatcctgccagatgctcatctacagcattgtccacaatttcatagatcaggtgattcaatccttttgttgaaacacttccgatatacatccccggtcttttgcgcacagcctccagaccttccagaacggaaatactgtccgcatcatatgtattgctttttcccatacttcttctcctaatacaaacttcttccatttgtcgctaacgttcagaatatcatgttttctgccttttttcaaacacttttttcgaaagtacgttcttatctgatcacctgacacaatgtctccgccaatacttccattgcatttttcatttcctgaaccgtattcgtctgtgccccggcctcgatcagaagcgatttcggaagcagatgcagattatagcggtaagcacgaagataaatatgtcttgcaaatccgggaaacatcctctcggaagccagttccatctgcagtgaaaaagcaagattatcctgaatatacggattgggcagatacgcaatgtccccatttgcccgtgttctgctcagaccattaaaatacatgatcctggctgtcggttttccattgacttctgtcacaagatgcgtgccttccgccacaccatctctgtgcagatcaatcgccacctctatcgacgggtttgcttccagaatcgggcgtactcctgcctctgcatattcataggcattgcttctgtccagctgtccattaatgatgtcataaacccctttatcatgaatcgtctcaatccctttctgattcaaaagttctgtcaggtaatcaccaattcctacgatactggtagacggatcaccgggaatagaatccacaaattcttcctgagaatgggtatgaaaaatcaaaattttcggtcccttccgggatgaatcgatcttcatactccttccaagcaggtcatccacattgagctgttccggaccgatcatcgtagaactatccactgtataaaaattactcagcagatagtcaaagtcccttaatctttcgattgacatatcgatcgaagacttactctctcccggattggccgcagcacctgctgttttgctttctcccaccagatttccatcggcatctacaacattttcgtcatttgcctgcttttccagaatttttgccagagtttcttcatcttccacctcctgctccaaagcctctctgtctgaaatatattttacaagtggaagccacgagagcgctttgtcccgaaaccagtcttttgtattttgcttttgttccatcctttgataggcaagtcccggcatgtacattttttccgtatatgcttgtacaacctgtctgcactcatatctgcattcatcccaaaacgatttgccgccgatcaatattaccaaaagcaaaagtgctgcgatcagcatccacgcccgcccttgttctcttttcatattccatcagtcctttgcacgatttctgccaacatatctggaatatttatatgaaatgtttttttgatttatgacatttccgtattggaaaaaagcagattcaaaccttctgaaaccgtataactgatctgctttaccatctcatccacgtctttgggggtaacaaacatcccgtttaaatgaggagcaatcaattctttgaccagctcatatttttctgctgcattataggaacgaagcacctctcctacacttttcaatgcctcggaagactccagcgcctgaatcagattttccattgtgtcattgacaatcgtcgccgcatccacaactgtcggcactccgattccgattacgggaactccaatggagtctcttgtaattccatttctgtggtttcccactccagaccccggatgaatcccggtatctgcaatctgaatcgtacggtttaacctccggctgtttctggctgccagagcatcgactgcgatgacaagatccggctttgtctcatgaaccaccccgcggatcacttccaccgtttccataccggtctgtcccatcactcccggtgccagagtgctgaccagattgacctgctccatccccattgcatattttccatattccttaacaatatgtcttgttgcacataaattgtctgtgacataaggccccagtgcatccggagtcacctgtcggtttccaagcccaacgatcagaacagacaactcttctgtttctattttacacgtctccaacagctcttttataaactctgcgattttctcagacacttctctgtgataccctgtatctggaactgccagattcggtgcctccagcgtcagatacgtccccactggctttcccatcgcttttgctcctttttcggtctcaatccgtacccgtgtaatccgaatttctttttctgcatcgtaatcttcttccaggatcacccccggtatctcaacatgatctgactcaaaacgttctttttcttccaaagccaggtctgtacggacattatacttctccaacattctgctcaccctctcttttttatttgccgatcacatttgctacggtgtaaacagtaactaatatttccaataatttcagaaatatgtattgacaaccatggtcagttggaataaaatgaatgagtatgttccgttagaacgtccgtgtccgaatctggcggaattatgaattcactatttgaaaaatatttcatactatttggaggtgtacagattggctaacattaaatctgctaaaaaaagaattttagttaacgaaacaaaggctgctaaaaacaaagcaatcaaatcaagagtaaagacttctgtaaagaaagtagaagctgcagttgctcagaaagatgttgaaactgcaaaaacagctctgaaagctgcaatcggagagatcagcaaagcaggaagcaaaggtgtttatcacaaaaaaactgtttccagaaagatttcccgtcttacaaaagctgtaaacagcattgcttaatttttgatataaatacgaattaaaaaagacattcgctaccgtcatggcgaatgtcttttttatttcttttactgtcacttagaacttcacaagaccaaatgtattcacaattccatccagcctctgaccctctttgcaaagcggacagtctttcgctgcatatcctttatagtccggaagatctgaaacagtaaaaatagatttgacatccataccggctgcacgattgactgcactgaacactgcacagattccacacaccctgcctccataatacagcactgcttctacagcttttgccagcaatgctccagtcgtcacagaatccgtcaggatcagcacctgttttccctcgatcatacgctgattattgtgtcgaaacagcatctgtcccatggtatcaaactccggtgtaacaacagaaatattgttgccggcactcatggaaactctgcttgtgtccgccagatcttctgccataaacgctccgatcacttctgtatttttcagacatacgatcgtttctaccatcgtactcgtcttatattcctctgccagagtcatcgcagtctctcttgcattattatggcgagtcttcactgtagacatgtcaatgtatgtattcacatgggaattcatcgttgcaaaatgtccattcatcaatttaatacgcgcttttggattttttctggaacgaaggtttacaaattcttctgtcataagatccactcctctcgatgaaagatttccgtgtaatttatgacattattttatcacatctcactctatttttcattaaattcagaaaattttattttatctttttcattgtatctgcatatacccgttcgatgtgcattgccagatatccaacctccattttttccaacctgatcttacacccttgttccattttttcacagaccgatgctgcaagagcaaatgcctttgggtgcttctcttccatatagtcattcatatccagttgaatactctccccgcgcacagcacgcatgaccatatatttcacgtgattcatcagacgattatatgccagcgacatcacatcgatcttttgtccggtagcctgctccagcgcctgcacacattcccgaattgcccctgccatttgcattgccgaagaaaccgtctcttcttctattgcagaatggatatgcagtgccacatatcctatttcatgctcatctatttcaatttccagtcgtttcttcagaatattctccagttgggatgccactttatattctctgtaaaacaatgcacgaatgtcttctgtcagaggattgctgatctgttcaccatgcagcatacgctctgccgcaaaggatatatgatctgccagaggaaacaaaattctccgatcaatcgtaccgaattctttctgcgctttctgtaaaatttcatccgcaatttccagatattccggagaaatgctttttgccagttctttggagctcccccgctctgtatcttctttcaatgaatatctggtacagtctttcggagcttcaaacctctgactgacctttttcccaaagccgattccttttcccaacagcacatattccacatgctcttccatatgaattgcgatcactccgttgttattcaatactttgcttactctgtacatgacgtatccccgcccttctttcttctgataacagggtatcaaactcttccccaaaagtaaagcggacctttgcggtccgccctgcttttttctttttttgcctacacttcatagaaatccactgcaaataacggttctccggctttcacctctttcccggacaggatacgtatcttctgtccttctcccagctctgtacataaaatcggtgaacacagagacggcgcatgttctgccagataagagagatccactttcatcaatggttccccttttttcactttctgaccattttttacaaagacttcaaatccctgcccgtttaaagcaactgtatcaatcccaatatgcaaaagcaattcaagaccggaatctgtctgaaatccaatcgcatgtctggtatcaaatacgaatgcaatctccccgtcttccggagccagaatcatcgcatccgttggtatcactgccgctccgtctcccatcatttttcctgcaaacccttcatccggtacttctgaaagctccacggtatttcctgtgatcggactggatacaacaactgttttttgtacagttttctctcctggatgcccgcttgttctttcgctctttgcctcatccggctctgcatccactatttccatctgcggcagctcttctgctgtctccagataatcttccagattggccttgatcaccgtaacatgcggtccatagatcacctggataccctgcccttttttgacaatccctctggatcctgtctgtttcaaaagttcctctttcactttccccgcatccctgactgtaacccgaagtctggttgcacagcaatccacatcactgatattgctttttccacccagtccttctgtgatcatcgcactgaccggatccaaatctgcctttgtaccgtccgttttcttatgctcttttctggcattgacatctgcttttgtgtacagctttgtctcggaatcttcatcctcacggccaggtgttttaaagtcaaactttttaatcagtactgtaaaaatcacataatataaaataaaatagaggattcccactgggattactcgcatccagcttgttttttcattcccctgcaaaattccaaacaggaaaaaatccagaaaaccgccggaaaatgtaagtcccaccgcaatattcaagatatgtgcgatcatatacgcagtacccgccagtaagacttgtaccacaaacaaagccggagctacaaacaggaaggaaaattccaatggttctgtaataccggtcagcatacatgccaatgctgctgaaagcaacaatcccccggccgcttttttcttttctggtttggcacagcgatacatcgcaagcgcagcacctggcagaccaaatatcataaagataaattctcccgaaaaatatctggtagcatctgcactaaagtgtgcgatattggctgaatctgcaagctgtgcaaagaaaatattctgacctccctgcaccatctggcctgccacttccatacttcctcccaccgcagtctgccagaacggcatgtaaaatacgtggtgcaggccaaatggaatcagcgcacgtttgatgattccaaaaatcaatgttcctacatatccgctgcccgtcaccaaactgccaagtgcataaattccattttgaaccggaggccagataaaatacattccgattcctacaaacatatagacaatcgtagaaatgatcggcacaaatctggaacctccgaaaaatgataatgcatttggaagcacaatcttatgaaatcgattatgcagtgcagcaacaccaagacctacaatgatcccgccaaacactcccatttgcagggactgtatcccacagacagaggccaccgtaccttccaggacattttttgcaatttcaccgtctgctgtaatctctccatttaccacgagcataccattgattgctacatgcatcacgaaatatgcgatcagcgcagacagcgcggacacttctttttcttttttcgccattccgattgctactcccaccgcaaaaatcaatggcaaattgtcaaacacagcacttccgaccttattcatgatcgtcaagagcgcatggagcacggttgtgtctcccaggatcttttgcagaccataggtcgcaatggttgtctcattggtaaaggaacttccgattccaagcagcagtcctgccaccggaagaattgcgattggaagcataaatgatcttccgattctctgcagaacaccaaaaattttgtctttcattttccacttctccttttctctgtttccatctctcaactgaagtattattggaacatccttcagattttatactcgtgtatcttcttttgaaaaagcagaaaaaaagacactaacccccataaacatctgaaataacgtccatgtaaggttaatgcctgccgtacagttacacacctaatatatctgcattataatcttttcaatttctattgtcaatttatttttctggattttccggctcttcattcaattgcggccagattgtaagcaacattgtcacaaaacacgccgtccctccgatcacattcgaaatcggttctgccagaaacactccgttcgtaccaagatccccgatcaccggaagcagcatcgtcagtggtatcacaatgatcacctttcgaaacaaggaaaaaaacaccgcttgcttcgcacggtttaaagcaactgctgtggattgtcccgcaaattgaagtgccatcataaaaatcccacagaaataaatccttacagccaaaatcccatgctgcagaattccaggttcacttgtaaacagccgcagaaaaaattgcggttccaaaaacagcactgcccagattacagttgtaaatacaatacacccaatcgcagtaaatcggatcgcggatttcactctaaaatagcatcccgccccataattgtatccgatcaccggctgagaagctgctgtcagccctgtcactggcattgtcacaatttcccgcatagaattgatcacggtcatgattccaacataaacatctcctccgtatttttgcagtgtagcattacatacaatctgtaccagaccattcgtcaccgccatcacaaatccagatgttccaagcagtgtgatttcttttacaagtctcttgtccaaacgcatcgatttggaattcaaatgtaagattgcttttttcccggtcagaaattttaacacccaaaccgctgacaatccctgagaaatcaccgttgcaagcgccgccccctgaacgcccatatgaaacccgaagatcaacaccggatccagaagaaggttcgtaacagctcccagcatcacagtcagcatcccgatttttccaaatccctgcgaattgataaactgattcattccaagactgatcatcacaaatatggttccacaaagataaatacaaaggtacgcatttgcatatggaaatgttgcactgctcgctccaaacaaatacagcagcggcctgcgaaacagaaaacagaggaacatcaaaattgcacctgtgatcagaagcattgaaaaagaatttcccatcactttttctgcttttgcctcttcgtgtccacctcttgcgatggaacacaatggtgcaccgcccatgccaaacaaattggcaaacgctgtaatgatcgtaataaccggaagtgccaggccaattccggttaacgcgtttgccgatacatccgataaatgtccgatatatattcgatctacgatactatataaaacgttgatcagttgcgccaacgtcatcggaattgccagatttaaaatattctttgcaatacttccctgactgaaatcatgctcttgttccatacacacctcttccttctcatcaacaaaatccataccactgcaactaagaaccaacattcgcacgttggctggcgccaactaccgcccgctcgtaaacttcctttactcgcacgttggctggcgccaactaccgcccgctcgtaaactccctttactcgcacgttggctggcgccaactacccgaacaagaatagccagatatttgtgcgagcacaatatctggctattcttgttcgggtgaccggcttgctgcctttcgcctagttgttgatcaatttatcttcatcgctccagctatagagttttctgatttctgctcctactttttctgatggatgttcggatgccagttttctcattgctctgaagtgtgcctgaccgcctgctggtgacatatcaagcaggaagtcttttgcaaatgttccatcctgaatatcggaaagaatttgtttcattgctttctttgtatcttctgtgatgatctttggtcctgtgatgtaatctccatattctgctgtatttgaaatagaatatctcattcctgcaaatccggactgatagatcagatctacaatcagtttcatctcatggatacattcaaaatatgcatttcttggatcatatccagcttcgcacagtgtctcaaatcctgcctgcatcaatgcacatacaccaccgcaaagtactgcctgctctccaaagaggtcagtctctgtctctgttctgaagtctgtctccagaagccctgctcttgctccaccgatcgcaagaccatatgccagtgcacgatccagtgcttttcctgtataatcctgttctacagctaccagacacggtgttccttttcctgcctgatattcgcttcttactgtatgtcctggtgcctttggtgcgatcatcgtaacatctacgtttgccggaggtacgatctgtccgaaatggattgcaaatccatgtgcaaacatgagcatatttccttcttccagattcggttcgatatcttttttgtacattgcagcctgtttttcatcgttgatcagaatcatgatcacatctgctttctttgctgcctctgctgctgtgaaaacttcaaatccctgtgcttctgcctttgcccatgacttacttccttcataaagtccgatgatcacatgacatccggattcttttaagttcaatgcatgtgcgtgtccctgacttccatatccgataatcgcaattgtctgtccttctaatacggaaaggttacaatcttcctgataataaagttttgctgccattttacattcctcctgattcttctgcatctctgcagtattctgatttttatcgttaaaggtattcgcctttagcttactgttcttcttaatcaatatatgttacatcttcacagcctctggacaatcctgtgataccggttctcgccagttccagaatttcgtatcctttcagaagattcataaatccttcgagttttgactgtgttccggtcaattcaataatcatagattcttcctgcacatctacaatcttcgcccggaaaatatctgcaatcgaattgatctcacctctctgtgccgctgtcacacgaacttttaccatgatcaattcacggaatacagattccccgtctttcaacagtttaatttcaatcacatcttctaattttctgacctgattctcaatctgagataaaatcagctcatccccggatgccaccactgtaattctggtaaatctcggatctgccgtcgttccggctgtaatactgtcgatactgtatcctcttcggctgaacagacctgcgattctgctcagaacacccggattgttatcgaccaaaagagaataaacctgttttctcatattcctatttcccaccttcttttaaaaaccgagtgcgttctgttttttattatattagcaaagcgcacacacattgtcaagctttttttcgataaagtgtaaaagtgtttcttttcgtatgtttatgtattttccttcctcaaaatctctttcggaggttcaatttcatttgcaatcgtatgctctgtcaattcagaaagtaccttgatttttcgattgatcagttcacgcatgcaatttggaacatgctcctgatgcgctctgtgaattgccacacattctttacaatttccgtgataacggcaggcctttttgcacggacagtgatccttttctttgtactcttcacgaaacgctgcagcaaactcttcctgcaggcggagcccctcctgcctgttccccttatgaaattctgccatagctgccttttctttttcatttccttcaataatcatctgtgtttctccttctcgtatttcattaaagatgaattttaaaatccccaaaatcaaaatttccgcttccctgttttcacttcctttctttgtctaattttctgcatgcactctcaatcctgaacatcctctgcacatcgccttgaaacaactgatacttttccaaacagttctttacaaagctcctcctgttccgataagttcacaacatatcctacaaccactttacctcctgtctcttttgcaatcatcttcgccgcattttcaccaaatgcaccacataattcaatacattgcacgccactctccgccaattctttcgccaccctgcacgcttccttcaaactggacactccgatcatctgagctgcgcctttttttatctctgctctgtcatgatttgagtcaaactttcccatgatcataaatgcgaatttcatagtctttctcctttttcttttcattatacttatttcttctatattcagacaacaaaaataattcaaaagggaagatgcaccttcttcgtacaccttccctctcttatctgccttatgctctgtatccatccggattgccggactgccatctccaggaatcttcacacatctcttcaattccgcgttctgctacccagccaagttcttctctggcctttgtcgcatcacaataacaagttgcaatatcacctgcacgacgtggtttgatctcatatggaatctcttttccacaggccttttcataagctttcaccacatccagaacactgtatccaacaccggttccaagattgtaaatgtgaacccctttgtcttttttcattctctcgattgcttttacatgtccgattgccagatctactacgtggatatagtctctgacacctgttccgtcatgtgtatcataatcgttgccaaatactcccagacgatccagtttcccaactgcaacctgcgcaatatatggaaccagattgttcgggattccctttggatcctctccaatctttccggacttgtgtgctccgatcgggttaaagtaacgaagcagcataatgttccattccggatctcctgtatgaagatctgtcagaatctgctccaacatcccctttgtacgtccgtaaggattcgtgatctcgccttttggacagttttctgtgatcgggatctctgccggatctccgtatactgttgcggatgaactgaagatcatattcttacatccgtgttttctcatcacatcacagaggatcaatgtacctgtaatattgttatgatagtattcccacggcttttccacggattctccgactgctttaagtcctgcaaagttgatcactgcctcgatctcttctttttcaaaaatcggctctaaatcttctctgtttaaaatgtcacctttataaaatttcagtgcttttcctgtgatctcctgtactctttccagagcaacttcactggaattataaaggttatctactactacaacctcgtatccacgctccagaagctccacacatgtatgacttccgatataacctgctccacctgctactaaaattgccataacctgactcctttcttattctgcactttctgcaactacttacacccacagattgttagggtaaatcccctcttctttcattctgcggatcgcgtttacaacggtttctttgtcttctttatatgtaactccataccatctgtctgctgatttgagcacttttacttctgccttgccctcttcgatcagatcccctacaacagccggaaggaagtattcacatttcattggatttttctccagattttctgtcaaaaatgcagcaaatctgctctcaagctcttttaacatgctcgccgtaaatccaaacagattcatggacaccgtagtatccagtgcaaccggtacccatgtctttccatcatcctcagtaaacgctgctccatcctctgttttctcgatatgtgtacgttctgtgatccttgtcaggcactgattctcatctgtgtcacagattccacgggaaacatatccattctccgtcagcgtattgctcagcatatatccaaccattgcatatcggtacttttcttcgtcttccccggaggcaaggtaatcataaatcatctgatatgcatggacaccgtagtaatcatctgcattgatcactgcaaacggaccgtccactacatctttacaacttaaaatcgcatgccctgttccaaaaggctttgtccttccctctggtacggaaaagccctccggcaggttcgtcagctcctgatagacatattctacttcgatgaacttgctgactctgtcaccaatgcttcttctgaactcttcctcatgctctcttctgataataaagactactttttcaaatcctgctctttttgcatcataaattgaaaaatcaatgataatatgtccatcttcatctaccggatcgatctgtttcaatcctccatatctgcttcccatccctgctgccataatcactaaaacaggttttttcatattgcttacctccatatttttcaatttttcttctgcaaggattagtatattcctttcccctgtccacgtcaacaaaatacaacataaatacatgttcatttttctgtccatgcattaccgtgtcatttgtctatttctgctaaaacaacaattttccatttctattttttccggtcaggacagaccgtttttctgcgtttcaatcttctcggccagatcattgagataaacccagcgttccattttttcatccaatgccgcctgggtttcttccttttgctgcatcagttccgaaagtttcaccgaattggtcgcatttttcaccatgtcctgatccaacttctccagtttttcttccagctctgcaatatcatcatcgatcgtttcatattcccgggcttccttaaatgaaaactttagttttaccgggctgttctgtttccatgattttaccgtatttttcggctttgtcgcttcttgtttttctcccggttctgcaccagcttctcttttcttttttgcttccagataatcgctgtatccgccttcatattgctgcagatgtccattcccgtcaaattcaaaaatacggtctgccacgttatccaaaaaataacggtcatgagagattgtgatcacaattccctgaaaggaattcagataatcttccagaatggtcagtgtcggaatatccagatagtttcctgcctcatcaatcaacaacagattgatattctgcgccaggatcccaagcagatacaaccgtctcttttctccgcccgacaactttccgatgggagcatactgcatatccggcgtaaataaaaaccgttccaaaagctgagatgcactgatccgtccttcttttgtgacaatatattctccgatgtccttcacataatcaatgactctctggctgtcatccatttcctgctcttcctgtgcaaaatatccgatcttaacagtctctcccacttcaatggtgccggaatccggctggatcagccctgccatcattttgatcagcgtggattttccacagccattgggtcctatgattcccaatttctgatttttcagcacagtataggaaaaatccttcacaagtactttctccccataggccttgctgacatggtgcagttccatcgtcttctttcccatacgggtttctaccgaatccagtgtgatcgcagcatccgttaccggagcactgccgttttttaaattctccaaacgctccagacgtgctttctgctttgttgttctggcacgacatcctctcttcgcccattccagttccatgcgaaggatgctctggcgttttctctccgaagccagctccatctcttctctctgtgcttttaattccagaaactttgtgtagtttgcatcataactgtacatttttccatgactgatctccaagatccggttcgtcacctgatctaagaaataccgatcatgtgttaccatgatcacagttcctctatatgcccgaagatagtcttccaaccaggagatcatctctccatccaggtggttcgtgggctcatccagaagaagaagatcaaaatcctctgacagcacttttgccagagccactcttctcttctgaccgccggaaagatgttcgatcttcatggtatgatccgtaattccaagaatattcagattgctctgcaccttccactgcatctcttctgccacactctgcacatatgacaaaacagtcgcatcttccggaaatacgggattctgagtcagatgggcaatcttcatgccattctgccggataatctgtccctcatccggcacctctgttcccgcaatcatccgaagaagagtggtcttgccggttccgttgattccaacgataccgattttatctccttcctgcactccaaaagatgcgtcatcaaagattattttctctccatatattttccggatatgttcaatattcaacaaattcatgtgatatctccattaacttttcttagattctgctgttttctcacagcattctaactttatcacatttgtgtggggaagtcacccttttccttctcttttgtcatcttctcactccctgcatctatccttttgaaaacggatatattttgtataacaaaagcagagagactcaacatcttcttgacaaactgcaagaacacgttacagtatgaatagaatcactttatataaaagaaccggaggtttgtacaatgtttcaaaacaaagtagctgtcatcactggcggagcacaaggcatcggaaaatgtattgctgaagaatttaaaaagaacaatgcatctgtctatatcatcgacaaacaatcaaacgatgactttatcggtgatctggcaaaaaaagaagttctgcaccactttgcagacacagtcattgcaaaatatggcagaatagactatctgatccataatgcacttcctttcatgaagggaatcgaggaatgttcctatgaagaatttaactatgctttaaaagtcggcatcacagcgcccttctatcttacaaagctttttcttccgtactttacaccagatgccgcaattgtaaatatctcttcttcccgcgaccgcatgagccagccgcagaccgaaagttacacggctgccaaaggagggatcacagctcttacacatgccctcgctgtcagtctcgccggaaaagtccgtgtcaattcgatctctccaggctggatcgataccactttcacagaatatgacggtgcagatgcaatccagcaccccgcgggtcgggttggaaatcctttggatatcgccaatatggtactatacctttgttcagaaaaagctggttttatcaccggagaaaatatatgcatcgacggcggcatgacaagacagatgatctaccacaatgattatggatggacactgaatgaagagcaaaagagaggtccactataaccttcggtactacattcaaaaaccagctcaatcgcagcctgttatacaagagggggcataccagataccggcatgccccttctacatttttttcattctatttctttttcttattcttcaatcactccgccattagcttcgatcaggccgttgatataggcacttcccaatgcccggtcaaaaagaccatatcccggctttccggtctctccccagatcatacgtccatgatcgggacggaaatatccttcaaatcccgtttcaaccagtgccttcacgatcgcattcatatccagagaacctttttgtgtcaagtggcctgactcttcaaaggatgtatccggaagaatcttcacattcctgatatgcataaaaccgatacgtcccattgcagaatacttgcgcaccatcgcagggatatcattgtccggcgaacttccaagtgatcctgtgcaaagacacagactattcgccgggctgtccacgatcgacagataacgatccatatttttctcacatgtaatcaccctcggcagtccaaaaatcggatacggaggatcatccggatgtaatgccatcacgacatcacacgcttctgccacagggatcacccgtttcagaaaatattcaatattcgcccacagtccttcttctccaagttctccgtatgcccggatcagctcacgcacttcatcctgtgtgtagctggcatcccagccaggaagatgaatatcatctttcagtggatccagccctttcaactgttcccagtacatcacaagactggttgagccatcttctgcctgtttatccagctgggttcttgtccagtcaaaaaccggcataaaattataagtaacacatttgatcccatacttcgcacaacgccggatcgattcacaataattctcaatatggcggtctcgctccggtcttccaagcttgatttcttctgtgacaggaatggattctaccacatcaaataccagcccatttgctgcacattcatccaccagatgtttgatactctcttccggccatacttctcccggcttcacatcatacacagcagaaacaatcgaacgcattcccggaatctggcggattttatccaacgtaaccggatctgtatctccataccaacgaaatgaactcttcactcgattttcctcctatacccttacttttactactattttctttacctgacaggaaccatctgccgtcattcgtctcggagcatgtccatcttccggcggaacgatcgcaaaatccccggcttttaaaataatcttgccaaactctgcaggctcctgataaaaaatcaaatctctctgcgcatcatactccatggacggaatcagattttctgccggctcataaccaaagcactcctctccctccacaacatactgcacatcgaagtattctttatgactttcaaacggacaatctgaagcatccattgtagaataactctgtacattcgcatacacttcatctccgtcaatcggtacatttcctaccggcagagcggcaagatctgtctcttttaaaaatgtaaacgcttttttaaatttttcgctaagataatcatatttctcagccagcaaaatattggtcgtcagcatctcttttcctcctgatttttatcagacaacacttccctgttccatttctgtatttcatcatacaaaccataagaagtatttttatcataagaatacacaagcagcacatccagcatatacggagacgcactcagtcccaaaagctgtccggcaaatgccattgctgcaatttctgacagacatgcgatcacagatcggttggaaaacggttttttccacaactcaaccttctctgtacgggtaaagatttctcctgcatatcgttcctccactgcatgaaacaattcgtgtgccagcaagatttccagaaggcgctctttttccaggagcggacagccacactgtgtttccagcgcagccgccttctctacgcagtctgtaaaaatcgtaatctcatccggctgtacatactgcgcaaataaaaccacgcctcctccggttggaactttcggcatctttaccttcatgcccattttctcagccagaatcttcggatcttttgttccatatttttcactgacacgttttgcccattcacgcccacacgcattcgctttcgccgtgtagacatccttttgctccggcgtaaacttctgctccagaggttctcttgcaaatgcgtagcgcccccaggcttcttccgtcacatgttccagagtctgcaccatattgtccaatggaatttccggatacatttttctttcttccagtattcttttccctgccaaagcatctaaaaaccgatttcttctcccatgcttttccatcgtgctgtgtattcccttctatttacagactgtttttcgctcccacgataattacatcgtcagacggattgatcatctgcatttcaacttccatcaacatcatgatcttatccagatcaacagaaccggaaaaatccatcacacgcgctcctgcacaaatatagtaatccgggcgcaaaattgcatcctgctggtagatagccagctcttcccacatctgagaaaccacattgcgatagcttcccgctttgcaaagaagtgcttttccatcatttctctgcactttaataaatccttttttatccagaatacgaacgggatgttttccttttctgtccgtaccaaacacatagaaattctttgtggcacattcttccgtaatcgcagaaggtgcttctttcaaatcctctgccgcaagctgacgtgcttcttctgccgtacattctttcaacagatctgttgtttttacttctgtggatccaagtgcgatcgctgtcaactttgaagtctgtgggtcaatttcaatatgaacatccacactgtctgctgcagcaccactttccactgctttgtcaatcgcttctgctttgatcgcgcgaatatcttccggtgttggatttggcaccactcgttccaccacgtcacgtaccatcgcaagcgcaacaccaatggaagaaatcacttctgcattgtccggaatggaataacgaagccccattttatccgaacagaatccgatcagagaagccgctcctccgccgacacctaccagactgatctgatctttttccaaccggtatttttcggccagttccatgatgatcggttcaattttctcgtaagctcttgtcaaaatctgctctgcaacttcttctactgtttttcccatatactctgccagaggctgcattgccttgcgcgctgcatttgcatttccatatgcaaaatattccggtttgatcaatcccaggacatttgccgcgcatgtatttgtgatcgtgatccgttttccgcctttgagttcaattgccacgtaatccgccggatctccttctttcggactgaagaataccactttgggatctacaatttcttcttctggagtaaatactgcataatccagacctgcaatatgtgcagaacgcggtcccacatctttgacaccacttttgtctgcccgcaccatgcttcctccggcaacaccaagcacccgcacatccagactgctgatgtacgtacgatgcccgcctacgtttgaatagtcaatggcaggacgtccgtctttgatcacaccgatattcgtcgtggttcctccgacttcaaaatatacaccattggaggcacgcagatacatcagacttcccatgacggaagcagcaggaccggacaacatggtaagaacaggacgctttttcatttcactgatctccataacaccgccgtcccctctcatgatcatcagaggcacttctactccggcactttttacactctgttctgtagagttcgctgtattgagcattttgggcaaaatggacgcattgatcgcagccgtacgggtacgtctggtcagtccgtaaagtttggtgatctcactggctgcagttgcttcaagccccatatcctttgcaatcttacagattccggtctcgttttccatatcatccactccgtaagattcactggctacgataacttgtgcgccgtcccctaccaacgagcggatggtatctgctaccagctcatcagacagattctcatcgcagatatatctgttctgcagacggataaatcgtccggatcccaggttgatgtctttcatatttgtctgagcttttgcaatccagccgcccactcctttgggtcctacaccgatcactcctacgtttgctacatctccttcaatgagagcattggtcgcctgtgtcgtcgagtgcgcaacaaaaataacatctttcggatcgatcgaattttctttcaggcagttttgaaatgcctgcacaactccggctgcaacgcccgccttgtcatcatgtgttgttttcacagaagactttccgataatttcatgggtggcattgtcaatggcaacggcttttgtatgtgttccgccgacatcgatccccatacgtacttttctattactcatttgaagctcctccttaaccaaacataatgtaagtgatcacctgcatgatgatacagacaatccatgcaaccggcaatgtctttttcagatgctctctggttgatacttttgcgtaacttactccccatgcaatccaactctgtgtcatacagatggatacattcattgtaatcgaaggaatgaccatcagcgcaaacagatatggagtggagaacccgattcctttcaggattcccagtgttgcagctccgcagccaaaaagcgtcagaggtccgcggaataatccaagcggcgccaaaagtgcaaatgcaatactgatcaccagtgtattgtttgggatcacatttccaagcagcgcattgaaatatggaacacaaagttctgctgccttattgaacatcgggatcatcagtaaaaagccaaccaacggcgctgtatctactacaccatcataaaaatctttgttcagcacacggcaggctccccggaaagatttcagctttccacaaactgccagcgcataaaaacttccgatgataaatcccaggatgatcggaacttttaatacaaccaaaagcaataccggcagaactggtgcgatcaatgcgatcgtcggaacatatccaggacgtgcttttctcacagccgatgcactccatgcatgtaccgttttcttctttctcaaagaaaccacgcacatcacaatgaccatgagcagctgtaccgccacaccgattcctgcccagcgaagacgcgccggatcatcatatgtgatcagctgttttccgtcttctcccaggaaaaatgccaaaaactgccctgtcagtaccggattcaaatacattccggctcctacactcaacataaacgatccaatggaaagcgtctttggaataccaagactcattaagatcggaagaatgatcaccccgattgcaacaacagctcctgcaccaaagagtgtggagaagattgctgttgtgacagcggaaagaagaacacaaatgataaccggtttgtctcctccaagttcaactgcttttcggatcagcgcatctgcaattcctgtctgaagcaatacacgtccaaaccatgcaccaaacacaacgttgaccaaaacacttccccagccttccggaccggcctggaacactttcgtgatcgcatctacaaaactgatatccgtaataccgggatatgcagcgataaattccggatttgttgcaaatgtatttccaatcaatggaagcactgtccagataatacccatgatcagcatacccatcatcaggtttccgccgcgaactgcgtatacggcaagacctacaaatgagacgagcagcaggattccaattacatattccatgatgtttcctccctagttctctctttttcttacattttcaggatagattcccatacctcttcgataaccggaattccctgttctttattttctttgatatttttcagttccagttctcccggataatacacttccgcaccttctttgatcggctctgaagatttgacgtccgcaagaatctcttctacgatcgcatctgtctcttctactgtattgaattttgtcggatcaatcgcgatcataatctgagtcagtccaatctcatctccgaacgtaccgatcttctgcacagaatttccatttgtcagaacagtcgcgatcagatcaagtacgatcgacagtccgcttcctttccaatatcccatcggaaggactctccatgttttttcgatctctgccggatccgtcgttaattctccttttgtatcatatcctccaggtaccggaagctgcacacctctgagccggcagtcttcaatctttccataagaaaactgagaaaccgcacagtcaatcatcgcgtgttctccattggaacgaggcactgccatgatcagagggttatttcctattttccggttcaatccaccccacgccggcatattcggcattgtattagaccagcagatgccgatacagccatgatccgctgcaagccatccatatgtaccgcctctcatccagtgattgttatttcccagcgccacacatccgacaccatattcttttgccagttcgcaggcacgatccattgctttctttgcgtttaaaggtccaaatccacgatgaccatcccatctttcaatggctcccatctgcatttcacaagtcgcttttgcattcggatcgatctctcctttttccaggtagctgaccacacgtggaaatcggttcaatccatgtgaaaacactcctgcaagactgttctgtgcaaaaataaccgctgcactttctgcatcctcgtgattgaatcctcttttttccaaaacacgtgtaaactcctgtaccataatatcatactgaactctcatgatagactcctttcgatttgtgaaaatatttttgaaagtttataaaagcgctttctttacttttcattatagttatctatctgtttttgtcaatattagaaaggaataaccattgtttttcagcatatattataattttcatccatatttttcgttgaaaatgctgatatttttttaacattttgcaagcgttttcttattcttgcaaaaacaggagaaagactttcttctgctttccgaaaatctttctcctgttcttacgttgtctccccttcaaccagctccggctgtatcgtgcaggatgaatatgtatccgacttttcaatcaggcttgtgagcagctgaacactcatcattgcaaccagttccggcttgttgtcaattgtcgtcagctgtggttcgcaaacttttgcgtattctgaatgattatagccagtcactgctacttcttccgggattttgatcccatgatgtaaaagcgctttcacaactcctgctgccgtaatatcttcaccacagacaatccctgtaaatttccgcttttcccgaatcagcttttcaactgcatggatgccgccttctatgcttggttccgccttcacaacctgttgtctcgcattctttaacccgcacttttccatctcagtgataaacccctcacatttaagctgtgcgctgacggtatccatatctctcaaataataaatctcacggtgtcctttttgtatcagatgctccaccgcaagcgatattccatacctgtcatccaccagaacggaataggaattgggcaattccagtttcccattcgcaagaaccaccgggacatttttcagcagcccgctgatctctgcgtttttgcaaagtgtattaaatacagaacccaccagtacaattccatctgcctttttctccaaggcagtccgaagatattttatggtctcctccagttccccgcctgtgttgcacaaagacacctcatatccccggcggctgaattcccgctcaatagtatatgctgtttttgcgtaatggggaacacggatatctaccgtcaggacagatactgtcttcatggacttgctcaccatccctcgtgcgatcgcactcggcgtataattatttttttccagaatttcctctacccttttgcgcgtgaccgggtttacatttcccttgtggttcataacccgtgaaacagttgagatcgaaactcctgcttcttttgcaatatcatatatattcataatttccctctttccaaactccatacctttatgaaagggcttttataaaagcatacgtgatgcatccaagatttgtcaagacagatttttacaatttccggattctctcttgacttctcccagaactgtttatatactgtttatatagatatatacagtttgtttcacatataaaaggaggactgaccatgaactatctgttagacgtacagcatcttgacaaaactctggggacatttcatctacatgacatcagctttcatctggagccgggatatatcactggcctcatcggacaaaacggctgcggaaaaacctctctggtcaaaaccattttaaatctgtatcaaaaagatgcaggaaacattttgataaacggacattctatggaaacagaagagatcgccgcaaaagaccgaatcggagtcgttctggatcaatgtcttttcgatgaggatacaaaagtcgagacaaacgcccgctgttttggttctctttacagccggtacgatcaccgcgtgtttctggaattctgcagacgttttgatgtggatccaaagaaaaaggtcaaaaaactttccaagggacaaaaaactcgttttcaacttgcttttgctttttctcatgatgcaaatgtatttctcatggatgaaccctcagccggactggatccgctgtttcgcaaagaactgcttggttatatgcaggaaatcgtagaagatgggacgagaagtatccttttttccacacacatcacagaagatctggatcagattggagattatattctgctgatggatcacggacatctggtattggatctgacacgggaagaacttgccgaccgctatcttcttttacacggcacaagagaggaactggaaaagttggattccaagatcatcatctgcaatcagttcggacaatatcgaaattccacattgatcgactctgtcaaagcggattctcatacatacggaaatcttaccgtcaccagaccttctctggaagatctgatgtgctgttttcacgaaggaggtgtcattcaatgacaaggctgatcattcaacatctttggtctgatttcaaaaaacactggctcggtattctcttgatattgggactgtgttatattgggacggcttttgcactgactttcggactctggttcttcatgatagactcacaggcttatttgctttccgatgctgaattaaaggaaataatactgaacggatctgaagtctatactctgctgtattttatttatactgccggaattttactttctgtcatactgatttccagaaagtttcctgtccggctgctgaaacccatttatttttgccctgcagatctaaaaataaaacggaacgctttgcgttcttacctgggaagcaaatttgcgatttgcctggttttatttctattactctgcctgggctttaccggaagtctgatgatattttttcagactcctgaactcgcattgctgtttcttttatcctgctttatcctgattgacttttccatgaaggcagatcccggcaaccggattccaaatcgtgaactcgatgaggcgttggagggaaaagggatgagcatcgtcaatgtctactggttctgtctgcttgttctggaatatgtcgccttgttttgtcaaagctatctgcagacctcatggaacctctggatcattgtactttggagcattgccatgatcggaaatgttttggcagcagcttactgtatccatacttttttagacaacgtaatttcttacgaaaaactatattttccaaaacaggaggtacctttatgctgacattgatcttgcaaagtttatggtctgacttcaaaaaaagctggctgaacttctctattttatttgccttatggactatttgctatttcacatttggattttcagcgcctcccgcctctataggtctggggcttgcttttgtacttcttctttccacaaaattgccggtacgctttttgaaatccctttcgttttgtcctgctgataccaaaaagaaacaaaaactcctttggctatacctgtggacaaaaattttcatctgccttctgcttttctttttgtttcaaattttaggaggcggttttcattacttgagcacgactttcacaccccgtgaaacaatcatctgcctgctgttgattttccttatgatcattgcagcatgtttaaaccataccactcctcccccgattcatctcacagaagaatgggaacagcacgggaccttccacagcattctcaattttgactttcttaattttatctggataatgctgcttgtcgccgaatttgcaatttttaaatatacttctctaaaaacgattgtttggcttttgatcatggtcggaaacctgcttgcaactgcctactgtattcatatgttcctaaacaaagttctttcttacgaaacttgctttgaactgcaggatttgaatgaaaggaggcctgacccacattgaacatcctattaaaaccaggttcctcactgccgatttatgaacagcttgtacagtcatttaaggaatccatgctaaacggggaactcgctccaggtgatatgcttccttccatccgaagtctggcaaaagatctggaaatcagtgtgatcaccacaaaacgtgcatatgaagaactagaagccgaaaacctgatttattcccaacccgggaagggattttttgtaaaacagatggattttcgtgctttacaggaagaacaacttgttcaactggagcgcacacttactacctgtatcgaagatgcaaaaaagctttctctttcactggatgaatttcaggatctgatattatatttatggaaaggcagggattagtctatgtctgaattaatttgtaacgaactttcaaaatcttatcaaaattttcagttatctccaacttcttttcaactggaaagcggatatctgaccgttctttccggaaaaaacggctccggaaaatctacacttttacgctgcctttccggagtcgatccgttttgtaccggcgatgcaaaactggatggaatttctttaaaaaacgaaccggatctttacaaagaccaaatcggctatgtatctgacgaattgacttactttatggaaaagtccgctctggaaaacggagcgcttcttgggccgtatttttcaaactggtctatggaacgttactatattttaatggatcgaatggatttttctccttcccggcaactctggcagctctccaaaggagaatacatgaaaatgcagacttgttttgctctggcgcataacccgcgttttctgatcatggatgaaccattggaaggatttgatcccatctttcgaagaaaatttttgtccatcatgcaggatattttaaatgaagatgtgggaatttttatctcttctcacattaccgaaaccttgaaaaatcttgccgattatctgatgtttgccgataatgggaccatctcattccactgtccggaacaattggatgcgtttcttaccgatcagcgaaaacactcacattcacaaatccgagacttattgtcccgaaatttttaggaggtaacctgtatgaaccataatatttatctgaccgaaaagcgaatgcttcatctggaaggattttatctgctcacaggatgtctgcttttcctttatatgctctcttcacagtcagaaatgcagcgtgcctatttcgatctttccaatggacactcccctgattccgtcacgtttcttccgttttggatcgtgctgggtactcttgggctttccatatacctttgttacgaactttttctcattgctgaaaacggaatcatttccccgcgcatcaccagatacctgacactccctatccgatgtcgggattatcaccgcatgaaagcgcgaatctttttccggaaattggggctcctgattttgatactggtcataatgttccacctctcttttcttggatacaaactgccgctttctctgtggaagcattcccttccagagcttattcttacttgttgttttctgtttgccgcaggcgctttgatttttatcggatatctgctttgcgatctgctctgcctgaaacatcggcattaaatcgagtaggagaaatttctccttaagcgagaaatttcgacctctcacaccaccgtgcgtaccgttcggtacacggcggttcaatcaacttaacaagtaacacacctttcggtgtagtaatctaacattgagactaatccgaatgcggttagtctctttgtacttattgctttctgtacccatccgttatggcacatgtgagcatacctgtttcctgtatttgccactttatgcgccgcccattttggtacccctagctttatcaagttcttttctttgttctgtggagttttccaatgtttccaaatgcacatgcgcagtctgtatcgaatacgtttatctaactccttgcaaagtgttttcatgctacctatcttgaagtagtttatccaacctcttatgagctgattgagtttctcaaccttatagctattgttgactccccagctacgacgcgtgagttctttcattctcttcttaaactttattactgattttacatgtggttttgccttgtattgatgcgctcttaaatcaaagtaaaagccaaaaccaagatatttgagtccgcttggtctgtctactttgctcttggtcatattaaccttaagccctagtttctcttcaatgaatcttgagatatttctcataactctgttagcagacatctcacttccgaccatgataatacagtcgtctgcatagcgtacaaagttaagccctctcttttccatttccttatccagttcattcaacatgatgtttgccaatagtggcgagagatttcctccttgtggtgttcccacaatagagtcctcatattcatcatcaatcatgattccactgacaagatattttctcacgatagagattacatccccgtctttaatcgttctgcctatgatagtcattagcttgtcatggtttactgtgtcgaagaacttttccaagtcaatgtctacaatccaatcgtttccatcattcatcatatctaatgctgttaagattgcctgttgtgcacatctattcggtctaaatccataactatggtcatgaaactgctcctcatagatgggtgttagaacctgtgcaatggcttgttgtataaatctgtctgttactgttggtactcccagatttctgacaccaccatctggttttggtatctccactcttcgtactggttgaggtttatattttcttatcctcaactgttccttgatgttttcgccgttcttttcaagatactctttgagttctgtatacttcattccgtccactccctctgcacctttatttcgtacgacttgcagatatgctctgttgagattatcgttagataatatctgctccattagactacttgtgtccatgcgttctttcctttccgcctcgctcgatttgaccaccctttacccgattggttacggcagacgttgtcatttctgcaatacgagacctactcaaacttattgattgttcgccccttcgctccatttccattacagaaacttcttcactactatgagctcggctgacttctcacagttcgttgttactaggctaatgaaacctctgtgagacctccacgcttaaggcacgcactctttctctccatatatctgccgcatttactctgctactacaaatgtggtagttattagacttcgttgctttttgccaactcatctctcgtagcctagccttatatgcgatttctgtccgtcagaccggagatttgcctacagcttccttcagattccacctcacgatggacacccttgctgttcggctatacatttcccactacccgggcatgttcgggtagggtcaagcgatggcgcggtagtttccgtttccatcgcctgccacctcaaaccgtgcatgaggttctccctcacacggctttccgataatcttcttcccacagcattcaaaagactgccacatatcttttcttatttagataataaaagtactctattccactggttgcataccactttcgaaatccatacaacacatgctctctgtatttcttctgtttacgcctgtaatacacccgtctccatagcttcatccacacgtattcatcaagctgtttaaatcgttttgttgagtttccatgctgaaagtagtttctccatcctcttatgagtggatttagtttctccaccttttgctccagaccctcataggctgattttctgcaagtaattactctgattgcatcctttacctttttcatcgcctttttactaggcatcatataaggcaacttccgtccacttttggttttaccaaacttctggtaacggaatccaagaaagtcaaagctctccttattcatatctacaatctttgttttatgcggattcaacgtaagtttcaacttagtcattattcttttcagatgctcaaacgctaattctgcatcttttcttgttctgcacacaatcactgcatcatctgcatatctgactatgacgcctagttccttatgattttcccagtaggagtccaatacatgaagatagatatttgctaacaacggactaatgactcctccttgcggtgagcctttttccgttgggtaatatttcccattttcaatgactcctgcttgtaaccactgtctgcataacttaatgacccttctatcactgatgcgacgatttaataatcccagtagtatttcatgattgatgttgtcgaagtatccctgtatgtctgcatctactacataccagtttttatacaattcttttttcactttttctgtagcctgttttgcatctcttttagggcgaaatccataagaactatctagaaagtttgcttcaaagacaggttctatcactatcttacaggcttgttgcacaatcctgtctctaatagtcggtattcccaatggtctttgcttcccatccggttttggaatgtatactctctttactggtttaggtctgtatttcttattcttcaaatcctcttgaatatccaacaagtattcttctactccgtattcctcaatcatttcaaaggtaatgccgtcaatcccagcgctccccttgttttctcgcacttctttccaagcccgccacaaaatatccaggcgaaagatacggtcatacaacgcatgaaatctgcgttgcttatcctttttggctgctaggtatagattacgttgaagttgtcgtgatttttctattgagtgttgttgtccaatatttggcatgcactatcccttaccttcccgtcaatcttgattaaagcagagccccttttctcccattgtttttcttaccaatagttcatagatactatgggctcctccgacttctcataccacttcccaagaaatttcgcatgcgtgcttatatcctcagttacatacttgtggttatatgatggtatgagatctcttctgttccgttatcaactttcataacattccgctccctctacaccgaagggttcttcaatgctgtattccagtatctccacatcttccatggtcttcgtcagaaagtcagtgactcgactcccttttgtcccttatagggctaacgtaacgatgctacaggattcactttatgttacggactgctattttgcacctgtttctcacaggcatacctcgcttcaacacaatcggtcacccaaaagcattggaggttcgctacaaggctcactggcgattaccttgaccagactttcactggcaagctgataacagcttgcagaacacacgacttacacccgttagagcgcgcccatggcgcgcaaacaaaaatacggatggcctatttactgaccatccgtattttttacttttttcgttttctccatctcatattcagtttatataaaaggattaccagaagaatatatcccaatggcagaaatataacaagtgcaatcactactgcgagcttcgatttcttttctgactgctttttgtttttctcctgtttgacgggttcgatctttatttttttctcagctcctgtaagtttcgaaaacgcctcctcagtgagtatggccttttcctttcccaccggctgcccctgataggaatactcaaccagaacccgccgggttccccctgattcatctgggacatattccttttccaattcagaaaaggaaacaccttttggaaccactgcataggcattctcgttttcaaaatcttcaatctctgatgaagtctcatactctttcaaattcaatgtttcaaaattggcaaatgcgtaatcatacatcgcccgtgtatccgtataagcatccactccatatgtatgaaacaccactgcagcaagctgcatatcattttcctctgccatggtcacaagtgtcgtctttgactgatctgtataccccgtctttccggctttcgcatttgcatagtagtaatagttctctggccagagcattttatggttctgatccaggatcctctcttctgccgtcagatttgtaggcgggactttgtattccagagttgtttccaatctgcgaaattcttcattctgataagcggcggctgcaatcctcgccatgtcatgtgccgtcgtataatgattctcatcatgaagcccatttgcattgacccaatttgagccggtacagcccagctgctgtgaaatccgattcatctcttctataaattctgtatatccgccatttagatattgtcttcctacattttctgccactgcataggaaacctcattggcagacgcaagaagcatcccgtaaagagcggattccatgttgatttcttctcccggcttcattccaatctgtgcgtcatcccactgcaaaaaagaaatactctcttctgaaaaggaaactgcatcggacatttttgcatactgcagcgctgtcaaagcgctcagcactttcgtaatacttgccgggtatcttttttcctctgcctttttcgcataaagcactgccccactgttcatatccatcacgattcccgaagccgcatagatcgcgggtccctgtggccaccccggaatctcgtttgtatcaatcttctcggcataagatgccgctttttcctgctgttcctgtccgccttccggttcctccgcacacacagatgctcccggagcgagcacaaaaagcacggctgccagtacagcagaaagaactttcttcgttttcataagctgcctccattttgtttcaatcggttctattatacgcaaaatcgggtttgacgtcaacgaatcagattttctaagaattttctaaattttttccatctgctcttgaggattttttcaaaacaggatagaataggaacattcggaaggaggatttccatgaattctaaaaacaataaaaaagatctttttgacccggattttgaagttacttatgaagatgatccggtctttcattatgccgaagaaccacaggcaaaccgcgaatttcaaaacatagacttgaagtcacagccaaaacctccgcgttcccggcaaaaaaagcagaaaatccagctgccgctgcaaggagatgagaccattttaatgaacccgatttccaacggttctgtttcttctcaccccaatcaaaaacccccgcagtgggaggaagaacctgacaggcgaaaaaattctgtacgttccaaacgtccggaatcagattcttatgattatgaggacagccgtccccgaagaaagaactccgcttcttccagaagaaaggctgatcttctttccccactgaaaagtactgcaaaatatggcggcaaaacgatttataaaacagccagcatcctgatccgctttgtctctcttttgctgattgccggcactgccgcctttttggcatacaacttctggaaaggatgcgcgccttatggagatccattgaccgccgttgaggagaagaattactgcctcgcagcttatgctgctgtcgccggtttctttcttttgtatgaatgcatctcttttttatgggctatgacacgtgtacgtgtccgtgacggcagaaaaacctacaaagaagataccggacgcggacttttctcatttatttttatttacgtatgttcctacgcctctttttgggtgaatcggatcattccacagtcgcctgatgtgttaaggggaattcacggagccttggaggtatttggctctatgcacaatgctctgcttggtctttgcctggcgggagtcatttcctgtctggtccgtaaatacgcaaaataagtcgaacataacaaaacgccgccaggggatatcacatccaatatttcttcccggcggtgttttctatggtaaaagcattatattacaaatcaatatttatttcgtacttatcctcacgaaatacttctgattcatcatctgtttggaaacggttatctcaccagtactccagactgtaagatatctttcagaagctggtttgcctcttttttaatttcttcaaccgatatcttttctccatgcgcctcattgataaatccaagcatcccaaaacataagaagcccgcaattttcttcggagaatatttcacttctacattctgtcggattttattggtgtgattttcaatggtttccaacacaatgttataaaatgcagatgcaagatatggatttttctgtggacttgtgtactgaaaaaattcgaaaaaatcataatatacttccaaaatactatccagcatattacaatatccgatcacaaggttgttttccggattctctcgttcctgttttgtgtgataaatatcggttccaatctgaagcatatcattaaaaatgtcatcgaccagcgcatacttatcactataatgcgagtaaaatgtaatcctgctgatttcagcacgtttgcacaattccgtgatggaaatctgctcaaatgcaatctcactcatcataccaatcaaggtcgcttttaaatttttctttgttttgataattcttctgtcttccatagtttacatttttccttttttgtataaataactaacatttttgaattattgttcattgtttttagattctcgatttgctataattttaacacttgttaaaataacggtcaatatgtaagctattttcgcctttccgcatagaaagggcgtttacagatcaagggaggattttatgccaaagatagcaattatgacagacagcaattgcggcatcatgccagatgatgcacagaagtatcagattcacatacttccaatgcctgttcttgttggggaagagactttttatgaaggatacaatatcacatcagaagaattttaccaaaaactttcttccggggaacctgtcacgacttctcagccatcccctgcggatgtcatgaagatgtgggatcagctgctcaaagaacacgatgagatcgttcacgttccgatgtccagcggactgagcaattcctgccagactgccctgcttcttgcacaggaagaatactttgatggaagagttcatgttgtggacaatcaccggatttctgtgacacaggcgcagtctgttctggatgccgtcgtacttgcccgtcagggattcaccggagcacaaatcaaagagactttggaagcggaagccatggattccacgatctacattgccgtagacactctggaatatttaaaaaagggcggccgcatcacctcagctgctgctgccattgggacggttctgaatttgaagccagttctcaccattcaaggagacaagctggatgcctatacgaagagcagaggtatgaaatccgcatttaaagcgatgtgcaaggcactggataaggatctcagcggaagactctcaaatctccatgcacagggattgctcaaagccggcattgcatacacgcagatggatcctgacacacttgaatttttcaaagaagaaatgaaaaaacgatatcctgagttggagttattccagcttcctcttaccatgagcatcggatctcataccggtccgggtgcacttggtatcggactggtacgatttcacaaggcataaaacaggcgggaaaagccacataccttttcccgcctgtttttatctcgatttggcattcggatagatgcgctccatcctttcatcaccaaaacgttcatcgatcactttttcccaaccactttctgccggttttccatcggcacgcatgtcataacgcaccagtgctgccatggataccagaatattcactgacataaatgccaccagaatccaagtcagcacatatccccagaagattggaatcttttcaatccagcctgcaaacttcggatatagtatttttatccacacaaccgcagcaatcccccagaaaaagcaatacagcaaattgatacggcctcccagattaaatggaatcttactgtaatcccaaaacaccttgccaaatacaatctctgtaaaaacactgcagacatattcataggctccgcccaaaaatgtacctacaacaaagatatgccggtccggtttttctctgtctttatacaacaatgcggtagcaatcgcaatagccagtccccaaacaatactgaatggtccccacaccagactgctcctgctcatccacacaccggctgtcagacgacaaaaaatcgtttctgtaaaatctccaagtaccgctccaatcaaaaacagccagaataacttataaaatccgcatccctctgcaaattttccttctttttccttgtgctgtgttttttccatgatctcaggatatgcttttgccattcgcttttctacatgtcctacgatccacagtgcaaatttctgcgtccatatcgctacttttttattccatcgaattgccgtcggcatctctcttcgaatatgaaatatcgctgcaagagatgcagaaatatccagaagcatcgctccgatcaaaatccacagcaaaacatcacggataaaagacggaatcatatggtacaccgtcagaaagaagggatctccatatcgcacagccacaaatccaagtactgcccacaatatcgaatactgcagacagatataaccgtcgaaattccatttcttatccgaataatcccaccatttatgctgattgagcctctccagaatcttccctgccatccattcgataatcgtagcaagcacaccacagccgatcagctgaaacgccggatcagccatcagctcttccagtgtaaccgccataaataccgcagcgactccgtataccaggcaaaatggacctgtcgaaaatccccggttcacaaactttttcttttttacagtaccgacaatggtctcaatcacccaccccaaaaacgaatagatcaaaagaagccatatcagctccatcattgtatatctcatgctattttctccatttatcttttgtactttttattccgattttcaaagattcgccctatatcttcttctaatcctccagctttttcaaaatctcgtcaactgctttcagttcttctggcagatcgtctttccgataataatcaatggccacgatttttccaggaatttcctgcttgtaaggacctgcctgaaccagcactttgtcacctacttccagtcgttcatcctctgttcgatatgaatgcctctctcctttttcatggaagatcacactacagatcatcacttctcccggacgctttcccctgcgataaatgtatggattcaaaatatcttcatagctctcataaaaccggatatatcctgccacctcccggataaaagcatcccacccgtccggaagccctcttcggttatacgttcctgtcactatccggctggcacttgctccgcaatccaaacaaagtttaaagacagcaccgtcgggttctttttcaccgtctgcactttccagctttcccaggtattccatgcatttgtccatcaattccggtatctcgtcgcgcatatgatattcttttgtcaattctcttcctggcgcaataatctgacggatcgtcaatgtctcttcatatctatccagaatcaattcttcctgataatcccagtggatgatttcatcctttgttcccgcttcactcttttgggtaaactggacattcctccggtattccaaggtaattttattgatctgtccgggaatggaagtcggcacgatctcatccataattttcaaaaactctttccagttttccggataagctcctcgtcccaccgattttttttctctttctccctgttcacaatacgccacttcccagttctccatctcttcatccggccttgtatccgacgccatataaatctctttccagcgttccatatgtaaatcttttatccgcgaaagccactcttccccatgctctgcggacaaagaataggcacattcaaaaaatggatacgatacactttcaatcactgcatccagtctgcagtcctccccggtacgaatctctatcaacgttttattttcaccttttctggtagaaaaacgaatatacttcaacatcacaccaaacttctccttcgctgtcatttccggcctgtcattctgccagatttcactattataccacaaaaataccagagatgaactcttttacacagaattcatctctggtatctctatatggctctgactccatataactatctctcatcgtttaaattttttcatgtattattcatcaaattccaggattacaaaatcgaaacgtgacgtcttttttgtatccacaaccgtccctgttgttgttttcaaacgctctgcattcttgaaatttttactgattcccaaagcatgttccaaaacataataataggaagacggaagcacacattctgttacctcgtatgtttctcccggatgaaatgattctacatgttccgttgtaaaatccattcttcgcatccataaccctcgcttttactgtttatataaatgatttctatgattccataaaaaacatccgccaccgaaaagcccaaaaatcaatccaccgtaaatgccggcacagatcagatcgcttagacaatgcatcatattcattcccttgatcatacagacaaaaataccagctcctgtaattccaactgtccagatcagtaccgctgatgtcaaaaacactgccattctggaactttcttcaatatgtcctgcaatccatttccacaatcttgtatacatctcttttcctcacaatcttttgtcttatttgacatttattgtaagactctgatgtgaaatctatacctgattttgacaaaatttttgtaaaaactaaagcagaattttttagaggatcttttctgcaattcttagcggcatatctacgatccagtctgctccggcattttccagttctgtcctgtcaccatacccatacaaaactcccagtgccgaaatatgacattctctggcccccagtatatcatgttccctgtcaccaaccatcagcacagtctgcctgtcttccacatgacaggacttcaacacgtactctatgacttctgcctttttcgtacggcttccgtccatattggcgcctccgatgaattcaaaatacgacgcgatcttaaaatgttctgcaatcttccttgcatacttctccggcttggatgtcgcaactgccagacggattcctgcattttttaactgttccagtacttccgggatgccgtcataaaccgaattttcaagcatccctttttcttcataatattcccggtaaagttctaccatctgatgcccttgttcatctgagatcccgcaaaattttgcaaactgttctgcaagcggcggtcccacgaaacaggtaagctcttccagattttccacgcctctgccgacttgtttcaatgcgtactggacactgttcacaattcccggaccagagtctgtcagtgttccgtccagatcaaacaacaccatttcatattgatgtctcatagtcttacctccccttttagaaactgcgaattttgtctgcatcctcactctgtgtattctcaattttcttgatcaccacataatatccaaaatcatcattcactttgacaaacacacgctctcccaccttatgtcccagaagtgcctttccaatcggcgattcaatgctgattcgtccattcagggaacttccacgtacggaagttacaattcgatatgtttccagttcatcatcatcttcacagtatacctgaaccgtattattcaaaccaacctcatctgcactggaatgatcctctacaataattgctgtttttaacattctctccaaataacgaatccgactttcgttcctgtttttttcttttttcgccgcatgatattcaaaattttcactcagatctccatgagagcgtgcctctttgaccgcttcgatgagttcttttctttccacaagttttctgtgttcgatttcctgccgaatcttctccacatcactctttgtcagtttttcactcataacttgcctttcttacaaatcaggcagaagcctgaaaaattcccaaacctctgcctgttctcgcttttatacttctattgttctgaaacgcacttgccctttgtcattattttacgagcaaagattttcctgtcatttcttttggctgttccattcccatcaactcaatcagagtcggagcgatatctgcaagacatccgccttctctcaatttataagccggatctgcattcaccaggataaacggtactggattggttgtatgtgcagtaaatggttctcctgttttttcatcaatcaactgttctgcatttccatggtctgcgcagatgaacatctgtccgtccacttctttcagtgcatccactgcttttcctacacactcatccactgcttcgattgcctggattgcagcgttttctactcctgtatgtccaaccatatccggatttgcaaagttgatgatgatcacatcatatttgtcagacttgatcgcatccaccagtttctcgcatacttcatatgcactcatctccggtttcagatcataagttgccactttcggagattttatgaggattctgtcttctcccttgtttggttcttctactccgccgttgaagaagaatgttacatgtgcatatttttcagtctcggcaatacgagcctgtgtcatattgtgtgctgccagaaattcaccaaatgtattggtgatctcttcttttacaaatgcaacctgtttattctgaattgtcacatcatactctgtaaaacatacaaatgttgtcttaactctctctcctctgtcaaatccttcaaagctatcatcacagaatgttcttgtaatttctcttgcacggtctggacggaagttaaagaagatcatagaatctccatcctttacagttgcaaccggtgctccgtcttttacaattaccatcggttctacaaactcatccgtcttctctgcatcgtaagaagcctgaattcctgctgtcgcagattctgcctgtacgccttctccttttaccagtgcgttgtaagctctctccacacgatcccagcggttatctctgtccattgcatagtaacgtccgctgacagatgccacttctccgacaccgatctctttcatttttgcttccagtgcttctacataaccttttccggatgccggcggagtatcacgtccatccaggaagcaatgtacatatactttttctacaccctgtctctttgcaagctccagaagtccgtaaatatgtccgttgtggctgtgtacaccaccgtcagaaaccagtcccatcatgtgaagtgcagaattgttctcttttgcatttttgcatgctgtaagaagtgcctgattttcaaagaagtctccatcttcgattgcttttgtgatctttgtcagttcctggtaaatgatgcgtccagctcccatgttcagatgtcctacttctgaatttcccatctgtccatccggaagccctactgccattccacttgcatttccttctacaaacggatattctgccatcagcttgtccatcaccggagtttttccttctgctacagcatttccctgtgttgcagcgttcaatccatatccatctaaaatcatcaatacggttggttttttactcatgtccatatctccttttactttatctgtaaatttgcaattttcttatcgaatttgcatctttcattccgtaacctattgtacctgttttttcctgattttgcaaatatctttcttatgaatttgcaaaatcatccatatccatttcatccttctgcctgatttcatccagaacccagtgtccatttaaatgaacaaatttccagtattcatagaacgcttcactttttctgcttccacgaatcatcattccggtctttttatttactacataatcaatcatttttccatggatcaaataccagatataatcttggtctttcccaagatcgtcaaacgtatgtaccggaagagcacttaaaagccgttcattcttctgtatcggcacttcatctcgaacctgcatccaccccagcttcattacaaaatcatcgtaacatttctgactcatatagtctttcgcataatctggatcctggcgcttccagcattcctgaatcacaaaatacgcattcttcacctgctatacatggatgcccccttttgaatacacttcatttgtttttgttgctttattataccatactgcacacatcatgcgcaatcgacgccataacacaaaacgccacgatgcacatttgccggcattccagccagttcaaccatgcttcgtgacgcttctgtcattctctgtgtaaaattttaaggaatactaagctctatttatagtttacgatctttccaaaatcagctttaagtgatgctccgcctacgagtcctccatcgatatctggctgtgcaaacaattccggagctgttgcagcatttacagatccgccgtactggatacggattgcttctgctgtagcttcatcatatacttcagcgatacactcgcggattcctttacaaacttcctgtgcctgctctgttgtagctgtcttacctgttccgattgcccagattggctcatatgcgattaccgctgttttagcctgatcagctgtcacattctggaatccaacttttacctgctgacggataaagtccatggttacaccctgttctctctgctcaagagtctctccacagcacatgatcggtgtaatcccatgctcaaatgctttcagaacttttttattgacatcttcgtttgtctcaccgaagtagtctcttctctcagaatgtccaagtactacatattttactcctgcatctacaagcattgccggagagatttctcctgtgtaagctccgctttcttcgaagtacatattttctgctccgacctggatatttgttccttttacagcttctacaaccggtacgatatcaatcgccggcacacagaataccacatctacttcttcgtttgctaccaatggttttaactcttctactaatgcaactgcttcgcttggagttttattcattttccagtttcctgcgataattttctttcttgacatactcttcactctttccggtactttttgtaccctgtttatttcaaaccacagtcacaaactgcgcctgcggcttgttttcgctaagcttttttacgggatgttccccttactaggctcgtaaacacctcgccaagtgcggcgaactaagtaaacgctaacctcaaactgcgcctgcggcttgttttcgctaagcttttttacgggatgttccccttactaggctcgtaaatacctccccaagtgcggcgaactaagtaaacgctaacctcaaactgcgcctgcggcttgttttcgctaagcttttttacgggatgttccccttactaggctcgtaaatacctccccaagtgcggcgaactaagtaaacgctaacctcaaactgcgcctgcggcttgttttcgctaagcttttttacgggatgttccccttactaggctcgtaaatacctcgccaagtgcggcgaactaagtaaacgctaacctcaaactgcgcctgcggcttgttttcgctaagctttttacttatcgttagcagctgctactcctgggagttcttttccttcgaggaattccagagatgctccaccacctgtagagatatgtgtcatcttgtctccgtatcccaactggttcactgctgctgcggaatctcctccaccgatgattgttacagcatctgtttcagaaagtgcttttgcaactgtttctgtaccatttgcaaagtttggcatttcgaagcatcccattggtccgttccatacaactgtttttgcagattttactgcttcagcatataattttgctgtttctggtccaatatcaagacccatccatccttctggaatctcattctgaggaaccactttgatgttcgcatcattggagaattcgtctgctgcaacagcatctacaggaagaagtaattttacacctttttcttttgccttttcaatcatctccagtgcatactgtaagtaatcttcctcaagaagagattttcctacgtttccaccctgagcttttgtgaatgtgaagcacattccaccaccaatgatcagtgtatctactttttcaagcaggttgttgattacagaaatcttgctggaaacttttgatccaccgagaattgcaacgaatggtctctctggattttctactgcatttccaaggaaatcgatttctttctgcattaagtatccaacaactgctgtatctacgaactgtgtcacaccaacattggaacagtgtgctctatgagctgttccaaatgcatcatttacaaatacgtcacataaagaagccagttctttggagaatgcttctccattctttgtctcttccgctctgtaacgtgtgttttcaagaagtacgatatctccgtcattcatcgcttctactgctgcttttgcattctctccaactacttcagcgtctgctgcaaatttcacttcctgtccaagaagttctgacaatcttactgctaccggtgcgagagataattccggttttggttctcccttcggttttccaagatgtgaacaaagaattacttttcctccgtctgcaactaattttttaattgtcggaagagcagctaccagacggttttcgtctgtaatctttccatcgatcaacggcacgttgaagtcacatcttacaagcactctttttccttttacattgatatcatctactgattttttgttaagcattttgattgcctccctgtatttaatttctgtcagacaaaaaggcccggtccaaataagaccggaccctttgtgagtctatttttcaaaacataatcaaatgattaaattttctatatttcgacttacagtaatgttccgaagtgtttgattgttcttaccatctggcttgtgtaagagttttcgttgtcataccaagaaacaacctgtacttctgttgttccattgtctaatggaagagccattgtctgtgtagcatcgaataaagatccaaatctcattcctacgatatcgctggatacgatttcatctgtgttgtatccgaaagattcgttagatgctgctttcatagcttcgttgatctgatcaactgttacatttccttctactactgctgtaaggattgttgtagatcctgttggtgttggaacacgctgagcagatccgatcagttttccattcagttctggaataaccagaccgattgcttttgctgcacctgtgctgtttggaacgatgttgcaagctgctgcacgagatcttcttaaatcaccttttctctgtggtccgtcaagtgtcatctgatcacctgtgtaagcgtgaattgtgcacatgataccagatttgattgctgcaaggtcgttcagagcttttgccattggagccaagcagtttgttgtacaagaagctgcagagataatgttatcttcttttgtcagctgctcgtggtttacattgtatacgattgtaggaagatcgtttcctgctggagcagagataactactttcttagcacctgcatcgatatgtgcctgagcttttgcttttgatgtgtagaatcctgtacactccagaactacgtctacgccgatttctccccatggaagttctttagcgtcagcttttgcatagattttgatttcttttccgtctactgtgatagaatcttcgccagcttctactttgtcagccagttcatattttccctgtgtagagtcatattttaacaggtgtgctaacatttttggagatgtcaagtcgttgattgcaactacttcatatccttctgctccgaacatctgtctgaatgcaagacgtccaatacgtccaaatccattaatcgctacttttactgccatgattaattcctcctaaagtttaaaaaaattgttgctgctttgcagctgtttattgcaaatctctaacgaagaattcactttgttaaagattcatcaactacggttattgtactaaaatggaaacaaaaattcaagcctaaaatatatttttatagaagttgtttaaaaataggttctctgccctgaaattctgtataatatttaaagccgcaagcctccaaaaccgtggctgcttttccaaactcgtacgctgcatgttccggcctgtgtgcatcggagcctattgtaatgatctctccgcccagtttcctgtaacgacggaggatttccggatgaggatggcaaaattccaacccatatttccatccggctgtattcaattcaatcccttttcccatggagagcaacttttttaaaatttcatctatttcttcagcaaactcccgataggaatattgttttgactgttcttttccatagcgtactacataatccagatgtcccagtacatcaaaacttgaaatggcatccagattctccattgttgcctgaaatgtttcccgataaacctctctgtctgtccggttttcaaagatttctccgtaataaggatccatcccatgtatcacatgtacagaaccaatcacaaaatcaaacggatattgtcctgtcagttcctgatacgcatccgccagctgtggctgaagccccagttcaatgcctcttctgatctgaatttttccggcataccggtctttccatttctccaactctgaaaaatatgtttttaaatccacttgaaatgcatcttttcctgtatcctcatgaaacggatattccagatccatatgatctgttatgcaaacagcacgcaatccctttgcaattgcactctcaatcatgctctgaatctttgcatcactgtctgtggaaaattctgtatgcatatgagaatcactcgttatcattgaatcgtacctccgccaagtacatactcgccatcataaaacacaacggcctgcccgggagtgactgctctttgcggttcatcaaatgtacagacaacttcatcttctcctgtcttttcaattgtacaccaggctcctttgtgattataacgtatttttgtaaatacatgtaatggttctgttaaatcttcaattgccatgaaattcagattccgggcacgaagttgtgttgtcatggattcttccctggttccgatcacaacctcgttcgttgtgggacggatttccagaacaaacgccgggtatccgagcgccagtcccagtccttttctttgtccgactgtataatgcgtgattcctttatgacgaccgatcaccgttccatctgtgagcacaaaatcaccttccggaacttttactcccgcctcttcttcaatataggaagcataatctccgtccgggacaaaacaaatgtcctggctatccggtttattggcaatccggagattgattttttctgcaatcgcacgcacttcctctttggtgtactctcccaccggcatcagcgtgcgtctcaactgctcctgtgtcagattatacagagcatacgtctgatcctttgcaagagtcgcagaacgccgaagtgtatatcttccatttcccagttgtaccacccttgcataatgtcctgtggcaatatactctgcgccgatggacaggctcctctgcagcagagactcccatttcacatagcggttacatgcaatacagggattcggagttcttccgttttgatactcctccacaaaataatcaatcacatgttccttaaattcttttttgaaattcatcacataataagggatatccagcgccgccgccactcttcttgcatcatccactgcgctaagtccgcagcagccgccgttctcttcctgcacagcctgttcttcatcctgccagatctgcatggtcactccgatcacatcatacccctgctctttcagaagatatgctgctacagaggagtctacacctccggacattcccacaacgactttttccattttaatattcctcttcttcctcttcctcatcttcatggatatcagacttcggtttttccagaccctcgatcttaatgtcgtgtttttctgcataatcccacaatgctgcatgaattgcttcttcagcaagcagggaacagtgaacctttaccggcggaagtccgtccagtgcttccataaccgctttgttggtcacctgcaaagcctcataaatactttttccttttaccagttctgtcgccatgctgcttgtggcaacggcagctccgcagccgaatgttttaaattttacatcctgaatgatctggttctcatcaatgtccagatagattctcatgatgtctccacattttgcatttccaacagttcccactccgctggcattttcaatttctcctacatttcttggatgctgaaagtgatccattactttttctgtatacataacatttctccttttctactgtgcattctgcttttttataaaatcttcatatagaggggacatacttcttaagtttgccacaatttctttgagtgtatctactgtataatccagatcctcttttgttgtctcttcccccaatgtcatacgcaaagaaccgtgggcaatttcgtgcggcagcccaattgccagtaacacatgagacggatccagagaacctgatgtacaggctgaaccactggatgcacagattcccttcatgtccagcatgatcaaaagagattctccctctatgaatcggaaactgaagtttatattattcggaaggcggtttgtgcgatctccattcagcctgcaatatggaatctccgcttcgatcctttctatcaaatagtctctgagttcccgctctttggctgttctcacttccatggtccgaagtgcgcgctctgtcgcagctcccattccaacgatgcccggaacattttctgttcccgcacgacgttttctttcctgtgcacccccatgtacaaacgaccggatttttacacctttgcgaatatacaagaaaccgattccctttggtccgttcagtttgtgaccgcttgcactgagcatatcaatatgacaggcatccacatcaatcggaatctgcccaaacgcctgtaccgcatctgtgtgaaacaaaatcttatgttcctgtgcaatttctccgatttcccgaatcggctggattgttccaatctcattgttcgcaaacatgactgaaataagaatcgtatccgggcggatcgcctgtttcaaatcctcaagttttaccactccattttcatccacatccagataagtaatctcaaatccgcgctgtttttccagatactcacaggtatgcaaaattgcatggtgctcaattttggttgtaatgatatgttttcccttcgccgcataagcctcagcagttgccttcactgcccagttatctgcttctgatccgcctgccgtaaagtaaatctcatttgcctgtgcgccaagcgcctgtgcaatgatctcccgctgcctgcttaccacctctttattgcctgaagcaaaactgtaaacactggatggatttccataatgttctgtaaaatacggtatcatcgcatccactacttcaggcgcagtttttgttgttgccgcattgtctaaataaatgagtctgcccataattcttctcctttttatctattgatcgcaatttctattggaagcgcacgcctgaccggatgaattctcttttaaagtttctcccgcttctacaagcgcttttaagttcatttcatctacggtctgattgatgctgtcattgatccgctgccacacatattttgtcacacaattgtctgccgcctgacagccgccttctacaaggaatccagagcattctactggattgaggtctccttccagcgcccgaagtacatctcctacagaaacttcttccagctcttttgcaagaacataccctccctgcgctccacggatgctccgaatgatacctgcttttttcaatttcgacatcaactgctccagatatcgctcagaaatttcctgacgctctgcaatactcgtgatcgacacaggaccttcttttccgtgctgcgcaagatcaatcagtgcgcgcagtccgtatcttccttttgtagataatttcacgctctcaccttcttgctgttttatgcattcttaatccctattattttactagggtttcctcttgtagaataccattgccattttgttctgtcaaggcaaaatcccgaatatgttattaaaaacattctatttcaggtgaatttatgtctgccaaaaaaacaattttacagggaactttgattttaactgcggtaggctttttatgtcgctttatgggctttttttaccgcatctttctcagtcatacgtttggagaggaaaacgtaggactctaccagctcacattccctgtatttgtactgtgtatttcccttacatctgccggtttggaaactgcgatttccagaacagtcgccagaaaacaatccctccagaagtcccgggaggcttctgagacactctgtctcgggctctttgtttcctgtctgctttccatactcacgctgttattccttcaaaaaaacgcagcctttctgtcggctgcgctgcttggtgatccacgttgtgaaaaaattctgattcttttatcttatgcattgccgttttcttctattcacggctgtatcatgggatattgctatggattgaaacagacacaaatcccggcgatttctcagctgattgaacaaattacacgcatcctttccgtctttttgttatactggttcacgatgcagcggggactgcacatcagcattgaaattgccgcagccggaatcgcactgggagaactgttttctaccttttactccatacgacaacttcagaaaaatcagccggatgttttccgccctggattttctgcgtcatcactgactcttcgttttcgggaactcatccccttatctctgccgcttactgccaaccgggtgctgcttagtcttctgcagggaattgaggctgtctctattcccagctgcctgaagctttacaaccatagcacttctgaagcattgagcacctacggagtattgaccggaatggctttgccttgtattctgtttccttctgccatcaccaattctgtttctatcatgctcatgccaaccgttgccgaattccaggtcaaagaacaatctgccaatcttaagcggcttctccaaaaagttctgggagcctgtttcctcatgggggtgtcttgctgtctgttttttttattcttcgggcagtggatcggacaatttctgttcgccagtaaactggccggaaattttattgtcacacttggatggatttgtccttttttatatgtaaacggttctctcataagtgtcataaatggattgggaaaaacaaccacttcttttacgatcaacacacttggtatcgccatccgtatcggaagtgttttcttcgcaatccccgtctttggcattcagggatacttgtggggacttctgatcagtcagcttgttgtcagcatctgctgctctctggtgttaaaacatctcacttccgcctaaagagtgtttaaaaacgcccccatcaatgacggatttacatacagctccagaatcatgccaaccaacagcaatcctccggaaaccagacttttctgcacattccactgcattcggggatagcagtaggcataccacaatacaatgaaatatgccggaatataaagcaaaaattgcgggagcattcctactatacacaggatactcccctttatccccattccaagaaccgccatagaaaacagaagtcctgcagaaaagcccgtccaaatcaaaaataaaacaactgctgcctttctgaattttgtaaaggcagctcctaaaagaagtaaaaacgggaacagtcgtacttgcatcagataccacacatactcccctgtcaaaatatctgctgtctgatattgcctcagaaaatattcactgaaaattcccgttccggatgcaaattgctctgcttccagattgacatataaaatccccaataaaaagcccggcataaaaagagccagtaattgtctctttacatgaaatatcttcaatcgctttctccttttcctttcgatatttcattatatgccggaactttctatttattcagttttcccatacttcgtttcatatgccagaagtgctgcgatcgtcttagaatcctcgatttctcctgaaaaaatcttttccttcagctcttccatcgtatatgccttcaaatcaataaattcatcctcatccaaatgctgcctggatgggatcaaatcttttgccacaaaaacctcaatccgttcattgcaaaaagctactgttgtccgaagagtaatcagccattccagattttcagatcgaaaccctgtttcttcctccaattctcttcctgcacacacaattcccggttcttcaacagcatctaaagcccctgccggaatttccaatgtataccgctccaacgcattccgatattggcgtaccatcaaaatttttccttcttttgtcacaggcacaaccgccgccgcacctttatgactgataaaatcccaaactgctgtgtgggttccgtctatttccatcgtgtcctgataaaaatctacgatcgcccctttatacttcaactctctttttaaacgtttgattttctcgcccatctttcccatctccttttccatcaaaaaacggaacttcttttccatctttcgatgttcaagaacttccgtttttcttttcatattcaattttctattttgcgtaatccgtgacgcgtgattcgcggatcacatttactttgatctgtccaggatattctaattcaaattgaatctgattagcaatctctctggccataagtaccatatcatcatccgttacctgatctggaactaccattactcgaatctctctacctgcctgaatagcaaaagatttatcaacacctttgaactggtttgcaatctcttctaattgtttcaatctgtttgtgtatgtctctaatgtttctcttcttgcccctggtcttgctgctgaaatcgtatctgcagcctgtaccacacaggcaatcagtgtctgtggttctacatcaccatgatgagcctccactgcattgatcacagttggggattctttatattttctacaaagatctacaccaatctggatatgtgatccttctacatcatgatcaatagattttccgatgtcgtgcagaagtccggctctcttcgccatacgcacatccaatccgatctcacctgccagaagtcctgacaactgagccacctcgatagaatgcttcaatgcattctgtccgtagcttgttctaaatttcatacgtccaagcaaccgtaataattccggatggatacccggcacaccaacttcaattgctgccgcttctccctcttcacgaatcatagagtctacttctttctgcgctttctctaccatctcttcaattcttgcaggatggatacgtccgtctacaatcagacgttccagcgcgatacgcgcaacttctcgacgaattgggtcaaatccggataatacaaccgcttccggcgtatcgtcaataatcaattctacaccggtcagtgtttcaagagttctgatgtttcgtccctctcgtccgataatccttcccttcatttcatcacttggaagctgaactacggaaattgtagtctccgctacatggtcagctgcacatctctggattgcattgacaacatactctttggctttcttgtccgcattttccttcgcctgagattccagttctctgaccatttttgccgtttcatgtttcacatcttcttcaacagttttcaacagatattcttttgcctgctcggaggtaagacctgagattctttccagttcctgtactcgtttctgactgagttcttccactttggcttcacgctgtcgtaattgttcctcttttgctgtaaattttgcttcacgctgctcaatagcttcggaacgtttgtctactgcttcttcttttgccagcacacgcttttcataacgctgcagttccgaccgtctctctttcgtctctttttcaagatcattttttgtccggatggactcttctttcacttctaaaagagcttcttttttcgtcgtttcagcagttttcacggcatcgtcaatgatttctcttgctttcgcttctgcatttccaatcttagactctgcattattcttcagattggtaatggtcagatagcgcgtcacgacaccaactatcaacgcgagggccgccgcaataattacacataaaattaccggcacaggagcacctccttatttaattttcattgtacatctttatgtattttatctacataaatacaacacttaaattttatactgttttaccaaccctgtcaagcattctcctcataattttgtatcacttgacggatgtcttcataacggaatccttttctggccaaatacccatacagtttgtgcaactgctctggtgctgcagatctcggatccacacgctttttcgcaatgatctttaaaattgcctctgtctcatccgctttttcaaagcaggcatccactgcctgtactgcaatttcttttgaaattcctttctggcaaagctggtacaaaatctcccgtctgcttttcgatgactttctgctctgcacaaaattttccgcataccgcatatcatttaaatacccaaaagatttgacataggatatcgcctcatccaccacttgctgcggatagagtccctgacataacttttcccgcagggctgcttcactgcgatccatatcttccaagagatgcatagcgcgaagttttgctctttttaaaattactttctgcaaaatctcctgtaccacagcttcttccagaatcgttccctctgccatccgataatgtgacaattcgcccttgtataacacaaaggcgaactgctcatccaaatatactttatactttattttggtcagcatctctattttcgtgacgaccatttttactcttctcctccgatcggcagctcagtctgctcttcttttggagtcagcttcagatcactttctttcgcttcttcctctccttcgatcagatgataatgctgacgtacctttcgatccagttcttccatcacctccggatggctggtcagatatgctttcgcattctcacgtccctgcccgatcttttctccttcatatgcataccatgcaccactcttcttgaccagatcgatccccactgccagatccaggatgtcaccttccttggagattccttttccaaacataatgtcgaactctgcttctttaaacggaggcgcgatcttgttcttcacaatcttgatgcgtgttctgtttccaaccatctctccactttgcttcaatgtctcaatccggcgaacatccatacgaacggaagcgtagaacttcaatgcacgtcctcccgtcgttgtctccggatttccaaacatcactcccactttttcacgaagctgattgataaaaataaccacacaattggatttgctgataaccggtgtcagctttcgcaatgcctgagacatcagtctcgcctgaagaccaacatgactgtctcccatatccccctcaatctcctgcttcggtacaagcgctgcaaccgagtcaattacaatgatatccaccgcaccggaacgaaccatcgtctccgcaatctccaacgcctgatccccactgtccggctgtgaaatatacaattcatcaatatctactccgatcttctttgcataaaccggatccaacgcatgttctgcatctataaaacctgcaattcctcctcttttctgcacttccgcaatcatgtgcagtgtcacggttgtcttaccgctggactccggaccataaacttcaatcacacgtcccttgggaacaccgccaagccccaacgccagatcaagactcaaacatcctgtaggaacagtctcgactgcaacatgacttccttctcccagtttcatgactgttccttttccaaaatctttctctaattttgcaatcgctgcatccagcgcttttttcttttcatcacttaccataccgacttctctcctttttgttcgaacagttgttcgctcttgttattatactattatatgctttttaaattgtcaagttatttttctatccggatttgtttttcacctccttttcctgatgctttttacagaaaacagaggtggtaaaaccatagaatgctctctttttaaatttaacacaggggaaactctcttgaacagacctggaagaactccttgaacgtctgggttataatcgagctatgatacagcacaggcggctgtatgacaaaattctgttttctataatacaacattatcttatcacgcagccgcccgggatgcaatcgattctttctatatgttttatatgactatttgaattctcagaattttactttgattccttcatcgactccacacgattctggatcgtcttgttaaaattctcaatcttcctttcgtaagatgtatccatatacttggactgcagcataaaatctgctgtagagagattatttgcgatcggaatatcataaacaactgcaatacgaagcaatgcttttacatccggatcgtgcggctgcgcttccaatggatcccacaagaagatcataaaatcaatctgtccttctacgatctttgctccaatctgctggtctcctccaagagggccgctgcagtatcctttcacaggaagacccgttctctctgagatcagttttgccgttgtccctgttccacacaaaaaatgccctttcaaaatttctttgtttctatcacaccagtctacgagttctttcttctttccatcatgagcaaccagcgcaatatgctttgctttgccaatctccatcgtcacaaaattgtcatccagcatcttttctcctcctgtcttttttcatactgtgcaatccgactgacctatgccatctgctccatcgaatcaaaccgaatggctgcgatcaaaccgatgattactgttattatcatactataaatcaaagcgattggaaagaccaaatccatatttaaaaagattccggccaatgctgaagccgccacaccgccccctagcacaaacatctggaaaaacgctcttacaacatcctgacccgtgtgcccgagcacatctcccacgacacattgcgccagtactttgctgtacatccggtttgcctgaaggatcgtgtaaacaaaaatcgcaagaacgatatcgattacttgtaccttccataaaactcctatcggcacacagatcaaaataccatctgtaaaggctttgatatgttccatcagtgtagaataccacagtttttttatcggactatccggaatcagatacagatatggcgttttgatctccgtctcccactttccaagatatccggtaaagatcagcgtcatatatgccaaaaccccaaacagaaaaatctgcggaatcccgcttttttcgaccgcctcccgcatcgaaaagcccaaaatcagaccaagccccagattcagcagtgtcattttggaaaaaatgaatgttttttctttccggtattccaaaagctgccgataaaaaattgcctttgccccaactgcctgataatgtactgtcatatgacggaactttttctttttttcttccaggcccatgaccatctcgccatttttcttttttctgatcatttccgcatatgagtctgcaaattttgctgcatcttcatagtaatctccttcacacggcattcgatatgccagaaataccagaactcctgttataaaaagataaagaatcgttcccactatattgagcagatccggtgtcaaaaggatcagatgaaatgccgagatctcccatccaataatcggaatcatctgtaataccggccaatcaaaaaacgccgaaacagaagaaaaagaaaccccatttttccaaaaatataaaacaatgattcctgtgatcacaaacaaaaataatttgatcccttgaccgattcgttttcttcccttttctgaaatcctctcgctggaatacagacaaatcatcaaactgatctccaacgccagattacagatgcagattcccgcaaacaatagaatcctccaaagatgcacacgaaaaacagttgctcctgcaatcataaatagcagaaaaaacacaatactgctcaaataattcatccaggctgcatggattaagacgattttaggattcaccggcgcattgaaaacaaaatgtgcatgagccggtctgaacaagatcccttttctggatgcataagccttaaaattcagcaaaaacatatacaaagaccataccgtcaggatgatcaccataccttttgcactgtcaaaccgaagctgcgtaacaagtgttccaagccctatcgccagaaataccgcatatgctgcgcaaaacaggatcaccaaaagtgtgactggctttttcactgctttttttaattgattgaccaagctttgccttgtcagataccataatgctctcacgatttttcaccacctgtcatctcaaagaacaatgcatccagatctttgtctcccacctcatctttccggtaggaacctatgatcttactcttttccatcacaaacatcacatcccagagttcttccaccatttccagcatatgggtactgatcagcacagtcacacccttttccttctgttcccgtatcacttctttcaactccttgatcgctttgggatccaatcccaccatcggttcatccaaaagcagaactttggggcaaacagccagagcacaacagatacttactttctgcatcattcctttggaaagctcattccccagcttttcctgcttgtcccccagatcaaaccgggtcagcaatgactccacttcttcctctgtaatcttgctgtcatatgctttcctcatatattctatatgttctctgacactcagtgcatcaaacatcgccggtatttccggaacataggcaaactgccgttttgcctctatgcttctggctgctgccccctggatcccgatacgtcctttatatcgaagtaaccctgcaatgcttttgatgatcgttgattttccggctccattcggtcccagaagaatgccaacagtaccgtccggcaccaaaaagctcacctcatccactgccagagattttccataggatttgcttaacttttgaacttccagcatctcttgccctccccatatttcctgtacatataaaaagattcctgtttattgtatcattagtttgatacaatcatacaagaatcttttttgtttgtcaattctttattcttctgtttctctctgtgtatacagtttaaataatgcctgtgttccttcgtctccaagcccttctgcctgcagctcttcatactctgcaagaacctggcttaagacattcagatccagctcactcatatttgcctcaatcagagccagtttcatgtctttgacaaaatgttttaaaaagaaccccgggcggtagtctccttttaaaatcttcgggccaaatagatccagctgtctgcttcccgctgcgcctgtggacaccgattgaagaaccgttggaagatccaaaccctttgcctgtgcataggcaagcgcctcgcacactccggaaagcgcacctgcgatcatgatctgattcgccagtttgcagtgctgtccgcatcctgctgctccctgataattgatattggttcccattgcttgaaacagtggcatacatgcttcaaaatctaccttttcgcctcctacaagaatggacagagtccctgtctttgcaccggtgtctccgcctgttaccggggcatccagcacatggaatcctttttttcgtccttcctcataaatcttttccgatatctgaggactcgtagtcgtcatatcgatcagataggctccttctttggcactgtccaaaatatttccactctcgaaatatacttcctccacatcctgcggaaaccctacgattgtgatcaccgcatcgcagtccctcacacaatctccaatgctttcatgaaaagtcacaccctctgcgatcacatcttctactttcgcttttgttcttgcataaatgtgcagatcaaatcctgcctttttcaaattccgcaccatggattttcccataatgcccactccgataaatccaatctttttcatcatctttcgcctcactactgtttttctacaacttcaccctgttttttataaatactttttgccggcacaaatccccgtacagaagacagcggataaatatttgtataacttcctataacggttcctggatttaagacacttccacatcccacttctacttcatctccaagcatagccccgaatttcttcagtcctgtctcaagctctccttccggagtttttacaattaccagcttcttatctgacttcacatttgatgtgatggatgctgcacccatatgagacttgtatccaagaatcgaatctccgacataattataatgtggaacctgtactttattgaacagaatcacattctttaattctgtggaatttccgacaaccgctccctctcctacgatggcgtttccccgaataaacgcacagtgtctgacttctgcgccttttccgatgatcgccggtcctgtaatggaggcactttgtgcaacttttgcagtctttgcgatccagacattctctccgcacttctcatactcttcctcactgagtgtctgtcccagttctacgataaactgtgagattttcggaagcacttcccatggatatgtcactccctcaaaaatatcttttgcaattgtctcatccaatgtgtaaagttcttttactgtcaattctttcataagttagttgtctcctttttgaatttcttgtttgcgcgatgttcgatttgaggatcccgtttttttatgccccaaggcatagtattgggccgctgcatcataaaatgtcttcagttgatattgattattcagcctttttactccttcggttctgctgataataaaatgatccagcttctgcatatattcgtccggtgtaatctctccgtctgccacataagtcagccctttctcccagcttgcagtcaattccggatttaacaacgaccgaatggactggttcaccacatcgtataccatctcaccttgcagtgtgggagtgattatctgtgtttttttattcaggctcagatacttgatatgaatcaatttttttaaaatctctgctctggttgcactggttccgattccactccccttgatctgggcacgcagttcttcatcttcgatcagctggcctgcattctccatggcaagaatcatggatccggaattgtatcgcttcggaggggaagtctctccctctttgatatgcaaagcattcactggaagctgcattccttttttgagattctgcaccacccgaaaaaattccggatccatattttgttccccggtattttgtggaatccccacaactttcaaatatccttcttctgccaaaaccttgaaatttgcgaaaaaactctcctcccggatttttacagtcactgccactttctggtaaatcgcgggcggataaaaaatgctcaaaaaacgtttcacgatacactggtatacattccgtgcggtcaaagaaaccgacgaaagtgccgaaagaccctgccctgtcggaatgatcgcataatgatctgtaatctgcttgtcattgacatatcgggtctttgccagatttttataggtgcccgttgctgcgatttctttcagatatgccgccataggctcatatttggataacccgttcagatttttgctgatttcctttgcaacggctgtagataatacccttgcatctgttcgcggataagtcaccagtttcttttcatacagctcctgcacgatccgcaaagtctcgtctggactgatcttgaatcttttggagcagtcattctgcagttctgccagattgtaaagaagaggaggatttttcttttcctttttcttctcaattgctgtgatctgtcctgagaccggtgttttttctttcagatatgcaatcagttcctgcgccttttctttctgcttaaacccgttttctttatacagagccggtgattcaaaataacgggaaccctgaaccgccctccactctccttcaaatcgttttccttctgcttcaaaactggcaagtacccgataaaagggagtctttacaaattcacgaatctcccgttctcttcgcacgaccatcccaagtacgcaggtcatcacacgacctacggaaaccactgcatatttcgtcttcaaataactggaaatactgtttccatatttcagggtcagcagccgggaaaagttgatccccatcagataatcttctttcgcacgcaggtaagcggatgcactcagattgtcatactccgacaaatcttttgcttcccgtatcccacggaggatttcctcttctgtctgagaatcgatccagacacgttttctttgtttgcccctgacatttgcttcctgctccaccaatcggtagatgtactctccctcccgtccggagtctgtacacacataaatcgtatccacatctgaccggttcaaaatggaactgaccgtctggaactgctttgccactccaggaatcacttcatacagaaatttctccggaagaaacggcagcgtgttcaaactccattttttcaatgcaggatcgtacacttccggatagctcatcgtcaccagatgtcctacacaccaggtcacaatggcttcttctgcctccagatagccgtctcttcttttcgtatttagttttagtgcttttgcaaattcctgtgccacacttggcttttctgcgatatatactgctttccccattcttatttatacaatcatctttctgtttattctattctttttggaacagacgcctcattttctgcaaaaacgtctttttctgtggttttttctccactctttttgccatcagtgcttctttcataaacacttcctgagaattgactgctttgccttctgcatcttttttacgatatgttccatcacttgtcataattcttgctttgacattatctgcaagcatcacatgcagatttcttaccagccgttttctgatctcttcattcagaatcggacatgcaacttccacacgcttttctgtatttcgcgtcatcatatctgcagaaccaatatatactttctgctctgctcctgtgccaaagacaaataccctcggatgttccagatagcgtcccacaatgctggtcactgtcagattatctgtctcgcctttgatgcccggcaaaatacaacagattccacgtacgatcagatcgatcttcacacctgccctggaagcctcggctacttttcggatgaaatccatatctgtcacagaattcattttcatcaaaatccgaccctgctcccctttttgaatctcttcgtccatcagcgccaacactttttgcttcaggctggtcggtgatacgatcagattcttatacactccgtccagatttccaatggacatattcttaaaaaatacggctgcatcttctccaatcgactggttcgctgtcatcagagaataatccgtgtacattttggctgtcttctcattataatttccggttccgatctgtgtgatatatttaatctcatttttactgcggtatgtaatcaggcagattttggagtgtaccttatatccttcaaatccataaagcacccgacatcccgcttcttccatacgttctgaccattcaatattgttttgctcatcaaaccgtgcacgaagctcgatcaatgcagtgacctcttttccattttctgccgctgcacacaaatattccaccagtcttgtctttttggcaagacgatagatcgtgattttgatcgtcatcacatccggatctgtagatgcttctttgatcagctttaaaaacggatccatactttcatatggataggacagaagaatgtcccgtttctttacctgagccatcacacttccttctcccacctgtgcggcaggctgtggagcaaatggcacatcaaccaatgatcgtttcatggaaacaggtactttatccataatcgaaaagatataatccagtttcattgggattttcgttctaaaaatgcaggcaggcgtaattttgaatttctcacagagatatttctctgtctctttgttcagcggattggccacttccagacgtaccactgccattcttctgcgcttattcaatgtctccttcattatatagcgaaagtcttcattgtccgcatagttctcatcgtccggagaaatgtccgcatttcttgtgacacggatgtatgtgatatccgatgcctgatattgttcaaacacaagatccagatactccatgatcactttttccatccggatataacgaatgtcatgtcccggcagataaagcacatctgaaataaactgaggaaccggaacaatccccatcatttttttctcttcaaaatgaagcgttgcgatcacatacagttctttattgagcaaatgtggaaatggatgatttgcgtctacgatctgtggggaaagcagcggaagcacctgttctttgaaataatgtttgacatactttttctcctgtgcctccagctctttgaaatccagcccacaaaccccgtatggatgcagctgtttttttatctccgcatacgtcttatcccgctctttataaagcggggccactgcctcataaatcttatctaactgttctttcggagtcatccccgatctgctgtctaatgccttgctgtccacagatgccatatcgtagagacttcctacccgaatcataaaaaactcatccaggttgctggtgaagatcgatacaaatttcatcctctccagaagcggaacactttcatcttgcgcttcttccagcactctctgattaaagcgcagccaggacaattctctgttctgggtataattcaaaatttcttttttcatatgtttctccttctgcaggtttcacacgaatactccacattgtatcatgtttcccttacaaaatatacttatttttcaagatattgcatcaaacggtcatattctcttcccatcagatcataaccatgatgataaaacgccatcagttcttcctggctccgctccagtctggaaacaggcttcacctgtggacggatcacaaaaatttttccctctctctccagactttccagctcgttcaatgtccggttataatatggtgctctccttaaaagtgtttttaaaagctccggataggactggtaagatcttcggtacatcttctcgattgctccagaaaccggtttttttctgtatcccctgttccttgtcagaacaacgatgatcttttcatttccaatttccatcgctctgtgtatgggaatggaatctgccagaccgccatccagatacaattcttcgtcgatatttacgatcggacaaagaagcggcatgcttgaagacgcacgacagatcttcatcagcctgtccggatcttttgtttcttccatgtattctgcttttccggtcttacagtttgtagtaaccagttcacaatgcatctctgactgaaaatatgtatcaaagtcaaatggataaatctgctttggataaatgtcaaaaatcatatccatattcatcagacttttctcttttataaatttacggactccgtaatagtaagacaaattcttatccgtaggaatcatacagtctctcgtccgtcccggttgtcttgatacatagtccactgcattgcaggctcctgccgaaacgccgattacatgagaggtgtaaacctccttctccataagataatccagaactcctgatgtaaatacgcctcttgttgctccgccttctaatactaaagttgctttttgcatatccatccctcactttctttgttccattatatactttttcctctcattcgcaaactcctaatcatgttaatttttcgcaaaaagatcctgtttctttgtttattttacagaaagcgctctcctgaccttgccattatgtgtgttctcatgttaagataagcggtggaattattactttatattatataaataaggagtcacgcatatgattagtgcaaacaatgtcacactgcgcgtcggaaaaaaagcgctgtttgaagatgtcaatattaaattcaccgaaggaaactgttatggtatgatcggagccaacggtgccggaaaatctacttttttgaaaattctttccggtcagatcgagcctaccaagggagaagtcaacatcactcccggagagcgcctttctttcctgcagcaggatcactacaaatatgacgaatatctggtactggacactgtcatcatggggaatgcacgtctgtacgagatcatgaaagaaaaagaagtcatctatgcaaaagaagatttcacagatgaagacggcatcaaagcaagtgaactggaagcagaatttgccactatgaacggatgggaagcagaatctgatgcagccactctgctcaacggtcttggaattgatacagaccttcactacaaatatatgaaagacttaaagggtgctgagaaagttaaagttctgcttgctcaggcattgttcggaaatcctgacatcctgcttctcgacgagccgaccaaccatctggatctggatgcgatcgcatggctggaagaatttttgatcaactttgacaacactgtcattgttgtttctcatgaccggtattttctgaataaagtctgtacacagattgcagatattgactatggaaaaatccagctctatgccggaaactatgacttctggtatgaatccagtcaacttctgatccgccagatgaaagaggcaaacaaaaagaaggaagagaaaatcaaagaactgcaggactttatttcccggttcagtgccaacgcttccaaatccaagcaggcaacttccagaaaacgtgcgctggagaaaattgaactggacgagatcaaaccttccagccgtaaatatccttatattgactttcgtccaaaccgtgaaatcggaaatgaagttctgaccgtagaaggactttctaaaaccatcgacggagtcaagattttagatcatctgacatttacattgaaccacgatgacaaagttgcatttgtaggtggaaacgagcttgccaaaactgtgctcttcaagatcctgattggtgagatggaaccggatgaaggtacttacaaatggggaatcacgacttcacaggcttattttccaaaagatttcggcggagaatttgacaatgactacaccatcacagaatggctgacacagtattctgaaaataaagatgccacttatgttcgtggatttctcggaagaatgctcttttccggggaagacggcgtgaagagattaaaagttctctccggtggtgaaaaagtacgttgtctcctctctaaaatgatgatttccggagcgaacgttcttttgctggatgaaccaaccaaccatttggatatggaatccatcactgcattaaacaacggtatgatcaaattcccgggagtactcttatttacttcccgtgaccaccagattgtgcagaccaccgcaaatcgtatcatggaaatcgtaccgggcggaaaactgattgacaagatcacaacttatgatgaatatctcgaaagtgatgaaatggcaagaaaacgccagacatactctgtagagacagaagaggaagattagaacactaaaaatacggaaagaatccccggatgttgggttctctccgtatttttgttttaataatatagtttgtcttcttcgataatttgggggatgcctccctctacttccacgatcgtcaccgcacagttctttggcactcccatctgccagaattttgccggactccattcatttttcatgcagtttttcattgccgtaactgcagcgccatgcgtcgaaagcaaaatcatcttgtcctgcaattctggattttgatataacgctttcagaaagccgtccactctctccatcaactgtccaacggactcaccatctccctttgggatgtaatttgcagtatcatcaaagaacttcacaaactccgcactctgcggatccagtccttctcctctgtatacaatgccttcataatcaccaaagcagatctcctgtatctgaggttcctcgatcaagggagtctttctcccctgcaaaacaatctgtgctgtttcttttgctctggatagaggggacgtatacgccagatcaaaaggaatcccccgcagtccttctgctgtcttttctgccagttctcttccatatgcattgaggggaatatctgctctcccctgcactttcttcgctttattccaatccgtttcaccatgtcgtaccatatataatttcaccgttgtttccctcctaagatatgttcttttatccgatcactctgtcccttagtatacgcatatttcctgtctcccgtcaaccgttctttgttccttcccgcttgcaaattcgcctgattttgtctataataatgacacataaaaaaacaaggagattactatggaaaaaattacaagctttacgatcgatcacatcaaactgactccgggactttacgtttccagaaaagatcttgcaggagataccccggttaccacgtttgatatccgtatcacaaatcccaatgaagaacctgttctaaatacggcagaagtacataccattgagcatcttgccgctacctttcttcgcaaccatgcagaatatggcacgaaaacgctctatttcggaccaatgggatgccgcaccggattctatctgcttcttatcggtgattatgagtcccgcgatattcttcctcttatgaaagagatgtttgcttttatcgcatcttacgatcaggaagttcccggagcctgtgcaaaggactgcggaaactttctggatatgaatctgccgatggccagatttgttgcacaaaaatacctgactcaggttttgaataaaatcaccgaagagcaactcatttacccacaatagaacgaggtgcctatcatggaaaaaaaacaaacatttgcatccgatacttcccagcgaagtatcaccgactggattcgtgcactcctggttcttcttttggggctgatcattgcgcatcttggtgttacgctctttttgctctcggcacttggcaccgatacttttacagtatttattcaaggtttatcccgggttgcaggattgtctgtcggaactgtgcacgtcatagttctatgtattttgatggttctgatgttatttaccaccaaaggatatgtcaaacctggaactattgtatgtgcattttgcggaggtcccatcattgacttttttacctggtgttttaaagagtacatcaacgcttcttctgggatgccggttcgtattatcagtgttctggccggatgtgcgatcctctctctgggaatgtctattgtaatcaacagcaacgccggtaccggaccgaatgatctggttgccatcatcctttccgacaaactcgaacgaattgaatttcgctgggtacgaatgggatgtgatgctttctttgtaagtcttggctttatcctgggcggtacagttggcatcggaacgatcatcgccatttttctgacaggacctatggttcagttttggcttccaaaaacaaaagttttactgcaaaaaatcaggatgtaaggcgtcatgccttacatcctgattttttatagcctcttttcaaaattttctgtcggatatacaaaaaagttttcttctccccctgctttgccagcataaccaacagtttttcaagaagagcctctgtttcttcatgcatcagatactgtccttttcctcccaaaaaatattccagaggatcccgatccgtataagctgctccacgatacactttactggctgccattctgtccaaaaacatctctacaacataattgaccggcattttcattccttccagcgccgcgccgtgcgttccataatcaatccaatattcatagtggtgcttattgcgccctttatgatgcagccatgcggaagaatatcccttttcctcacgctctgcattgttggggcttctgttcccctgataatatcgacagcccacacgaaattctgtccatccatattttgacatatcgtggagcaatccctgcctgtacaggccgacttgaaaacaaaatttcatcacaagcagtttatgccttgtaatcgtcacaaaatgttgaagtgcattcatcggtgaacttccttcctatctgctttttaacaaaatgatcgttcgtggttttacttcgatcttcttctgatcctgcagacaccacgcttcctccaaaatagattctgtacctgcaatctgataccattttttttctttttttaatgccggcaatgcaaactcatgagattcccaatgcatattataagcaataaaccaaaagctgtttttccagctgtaaagaactcccagctgtcggctgactactgcatcctgtatctgccatgcattttctccgtgatatgacacatccggaattccgcaggatgtccgatccacccctaacagtacactttcctggtggaacactgggctggattttcgaatacgaatcactcctttgacaaactgcagcaaatcatcataacttttctgtctgctccagttcagccatgcagtctcattatcctgacaatagacattgttatttccatcctgtgtatttccaaactcatctcccgcaagaatacacggtgttccctgtgaaagcagcagaagtaaaaacgcatttttcatctgattttttcgcagagtcatcacacttctctttctgctcggaccttctaccccacagttccaactatagttatagtcagggccatcctgattttgctctccatttgcctcattgtgcttgccgtcataagacaccagatcacagagggtaaaccctgtatgggacgtaacataattacagcagccatcttcttttgtatggtgcgccagccgtccgatcacttccctgaccattccttcatcacctttcaaaaaccggcgcatactgttttgatagccctcttctttcctgaagatttttgctcctttcaaaattggatctgcattcaggctgtcccacggaacattgtagggattcactacaaatccatccacatgatattccaaaagataaaagcggagacactccaaagccgtctgcggaagaatcttttctgtaaacggcatctccagaatcagctctatcccttctttgtgacaggctttaaccagatctttcaattctgtctgcgcatcatctgtcgccgcataagctgcttttggtgcaaaataatatccttttccatacccccagtaattttggtatcttcccatgtcttcctgaaactcatacaccggcatacactgaatttgatttatgcccagatcttttaaatatgccagcttttcccgaacgccccaaaaagttcctttgtgccgcactttggaagactggtgcattgtgaaccccctcacatgcagactgtatgcgatcacatcctgtacgggaatctcaggtcttctatccccttcccagtcatactctctttgtggaaatttccctctggtctgatgctccttcagattccatgctgtcccaaataccgaatgtcctgtgatttctttcacataaggatccatacaaacttttccatctattctgtaattgtactcatattctgccgcatccagatcttccagagccagaaaacgaacctctccgatcccatcttctgccggcatctcgatcacatactccggttcatgttttccctttttatacaagagtagttcacaggatgcctcttctggaacacacactgcaagattcagccttccgcttttgtaagaagccccgaaaggctgtggatatccttctgttttcttcatattcctcttcctcactgccagccatctgtaccatacatctccacattatcttttccaataaaaaatgtatcaatgtatgtcgtttcttcataatcttctcccgccagtattgcttctgcaatcttggcagcctgttttcccatattgatcggagactgtgctcctgttcctgcaatcatggatttctcattggtgagttccttttttatttccggagaaccatccacaccataaatcttcaaactgttttttccagcctcttttgctgcctgaagtgctcccagtgccatttggtcatttccgcacatgaccgcatcgatttttggattttctgataagatctgagccattttttctttggctgccgtcttatttccaactgcgtctgcgcgcgcaactacttcaaatccggcatttttaattgcttcttcaaaccctgtaatacgctcattgacagaattctgggacggacattccaacagtactacttttccgccctcgggacattggatcttcagattctctccgcatactgtgcctgcatttttattatccgaaccgataaaagcttctgtaagatcgctggatttcacctgcgtatctacattgatgaccggtatatccgcctcgtccaaagcttccagcgcaggcgtgattgcttcccagtctaccggtgacaaaaatactgcgtccaccccttcctgaatcatttcctggatctgttggatctgcttgtctgaatctccgtccggatttttgaccagcagtgtgtctcctttcgcctccagctctcctcgaatggattcttttaaaacatcaaaatagggattatagatatcgatacaactatagccaaatgtatatccttcttgttcctgtgtatctcctttttttccttcttcctcttccactactgcattgtcctccggtgtacccacgtttttcttacacccggaaagcatcatgcagccaaatatcactgtcaggaatactcctaaaaattttttcttcatcctgttttcctcctgatctcgaaaactctgtttttccaatataaatgcctgatctattttattctaccttgttttatcacattgtcaatagaaagaacctgatgtttttcttgctttttcctttcgtttttgttagagtaggcatatcaagaaaaaaggagaacgtgctatgagcgaaaacatgaatgaaacaatgaacgaaacagaaggcgtaacagtaactcttacgctggacaatgatgagacactggaatgtgccgtactgaccatctatgaagcggccggcagacagtacatcgcgctccttcctctggatgaaaacggggaagagtctgaagaaagcgatgtctatatctaccgtttctctgaaacagaagacggagaaccaaatctggaaaacatcgaagatgacgacgagtacgatgctgctgccgacaaattcgatgaatggatggattctctggaatttgatgagatcgatcttgacgaagaatagtcagacaccctcaaacaattcctctacaaagcgggaaggagtgctctcctttccgttttttgttttcacatatgtaattttcaacacatcctttgccctggtcattcccacgtaaaacaacctgcgctcttcttccacattctgctctttttctgccttctgatacggaattcgtccttcatttgcctcgatcaaaaataccgtgtgaaactccagtcctttggatgcatgcagcgtcatcagacggaccccttcctgattctgttctttttgctgctctttctttttcagtgcttctgtatattcttccacatgaacgaaccactcttccatcgtctgaaaaggcttcgctgcctcttcaatttctgaaagcacttctcttaaatctgcagctttcatatttttcgtagctgcatactctctcaaaaactcgtcatatccaatctttttcttcaagtactggattgctgcatatggagccatcttcgcaagcattttcagatcccactcaaactgatcgattcgatcctgcatccactctttatcgcaataaaatttccgcatctcctcaaaagaaccctcccgtcctgacagacagtctcttccaagataacgttttggacggttcatcacctgcagaaagtcttttcgctctctttttcccatcgccagcctaaaatatgacataatgtctttcgcaataaaatgattgtaaagattcggcagatgttctctcatctgaaatggtatcttttcatcaatcagtgcttctacaactgcccgtgcatccgtatgaatacgaaaaaggactgctatttcttctgccaaaacgccctgagacagttgctttttgatctgttctgtcacataagaagcctcttctacaggatcttttacttcttgtacgtgaagcgtctctcctgcttttttccacgcccggatctgcttgtcaaaacgcacctcattgttggcaattaccttcagagcattttttacaatattttctgaagatcggtaatttacatccagcagaagttgctttgcatttggaaagtctctctgaaactgaaacatcaacctggaatccgctcctcgaaatccataaattgactgatcatcatctcccaccacaaacaaattattttgtggtgctgccagcatccgaatcacatcatactgcacctggttaatatcctgaaattcatcaatcaaaatatagcggaatctctgctgccaccttttcaaaatatccggccgctttgtaaacagatctctgcacagcagcagcatatcatcgaagtctatctttctctcttcgtttcgcctccgctcatactctctgtatatctcccgaaatgtttctttcccacagattgtcgtttcatattcctcaatcttaagaccattattctttacaattccaatctcggaaattatctcttttaagaaatcttcctcttcaaattcatcgatctctttgcgattgacaatttgaagcagcatctgtcgtttttcctcctctgacaggatattctccggtccaaaccgatatgcccattttaaaatcccgtaataaattccatgaaatgtgccaaatgtaactgcagggcgacttcctttcatttcagaaaagaaacgggtcttcatttctactgctgcatatttggtaaatgtaatgaccagaatctcctccggttttacctgataggtctggatcaatgtctgaatcctgccaacaatcgtaagtgtcttcccggaaccgggacccgcaagaacaagacacggtccctcattgtgagagaccgcctcctgctgagcctgattaaaacccatacatacctctttctattgttccagcaacgcaataccggcacgaattctctttaaggattcttcctttccaagaacttccatcaattctgttgcaccgcccggtgtgttctgttttccggataccgctgttctgatcggccacatgacaaatccgatctttacgcctttttcggttacatatccttttaaagtttcaaataacgcatcattgctgtagtcttcctgcgcttccaggatcggaagtacttcttgtaaaacctccagagagttctctgcgtttgtcttcatcttcttatgtgtatacattgcagtatcgtactctggcaattcctcgaagaaatccacctgttctttaatatccgggaaaatttcaattctggtcttgaccatttttgcaatttttttcagatcgtaatcttttgtgatcacttctttcaaatatggttctgccatctcgtaaaatttatcctcgtccatggccttcatatattcaccgttcatccatctaagcttcactggatcaaataccgccggtgatttgctcatatgccgataatcaaatgcttccaccagttcttccagtgagaaaatttcacgattatcagaaggactccatccaagaagtgccacataattcaccactgcctctgagaggaatccctgttcgatcagatcttcataagaagaatgtccacagcgtttgctcagcttcttatgattctcatctgtgatcaacgggcagtgtacatacaccgggatctcccagccaaatgcttcatacaaacgattatacttcggtgcagaagaaagatattcatttcctctgactacatgtgtaatgcccatcagatggtcatcgattacattcgcaaaattatatgtagggaatccatccgatttgatcaggatcatatcatccagctctgcattcggaactgtaatatcgccataaatctcatcatgaaacgttgtcgtcccctcatttggtacattcagacggataacccacggttttccttctgccagattcgcttccacttcttctttgctcagtcccagacagtgtttgtcgtacacaacgatgtctgtcccgtcttcagaaacagaagttttcagggaatccagacgagctttatcacagaaacagtaatatgcatccccttgctctaccagctgctttgcatatttcaaatagataccggatgcatttctttcactctgtacataaggtccgtatcctccatccttatctggtccttcatcatgcagcagacctgttttttccagagtacggtagatgatatccagtgcgccttccataaatctctcctggtctgtatcttcaattctgaggataaaatctcctccttcatgttttgcgatcaaatatgcgtataatgcagtacgcagatttcctacatgcatgcgtcctgtcggacttggtgcaaatcttgttcttactttactcatctttatcttctccattttctatattacgtcatcttttttattatatcttaactgttccgccttgacaaggggatgtgaaccctgaaaatagcatccactataaaaatagccagtgcgatcattcctgcaatttccaacgtctgcagcaaataatatgcgcatcctgctctgtcattggctatgatcgaatatgcgatccgatacattcctgcccccggcacagtcggcagaattcctgcagtcaaaaatacagtcaccggagctttaaaaattctcgcaaacaaatgtgccataaacgcaattgccaaagcagaaaaaaatgatgcggtcaccacatccacaccgtggtgggtacaccccaaatagacaccgcctccgacagcccctacaattcctgtctgccagagatattttctcggagtctccaacagtactgaaaaagcgataatcgctacaaagcttcctatgatccccagaaatacactcatactacccctcccggatacaatgctcccacaaaaatcattccgactccggctccaagtccgatcgctgctgctgtcaaaaatgcttccagaatcctggccccgccggaaatataatctccccgcagcgtatcccgaatcgcattggtgattgcaacccccggcacgagaggcatcaacgagctgatgatcacagtatccagattccatccagaagtaactttacttacacagattgctgtaactgctaccccgaatgcacagattgtatttaaaatgaagccacttatctgcagccgtttccccagtgtgatcaaaactgccagaacaactcccgcaattgctgaaacgaaaatttccttgatcccgcctccaaaaagtggggcaaacccgacaggaaccaaaaccgtggccagattgtacaccgccacagaatactgtttccccttgatttttttcagctcccgatacgtttcttccagtgtcatctcacctgtacaatattttctggaaatttcatttacccgtacgatccgatgcatattcgtcccccggtcatggactctgcgcatcgccgtgatcatttccatattcggatcatccatcgtggcaacaattcctgtcatcatcacaaatgcctctgccacttctgttcctgctgtattgagaatgtgcttcattgtatcttctacacgatacgtctctgctccacttctgagcataatctcccctgcaagaactgcaacgtttaaaatttgtttacactccatcctcgtcctccatgatcatacatcctgccgtacctccaaacatcccttcatcatatgagatcaaagaacaatgtctcatatctattttatccagttttgtattggcaaatgcggattcacggattgctgtcacatcttccggcattttaaagattccgaccctgcctgccggaaatgcggccaactcggttccccaatataaaatcccatcttttgccgcataaaatcctgcttccgatgtctcgatccacgtcagctcactgagttcagaaaatgctccattctcaatattttctatattctccggaatataaagctcataaatctcatcaccaacacccgtaaaggttccttttcggattccgatacattgttcagacggcagctccagatacccatcttccatctcgcttttggcaggatcaaatccacagatcatgttttcctgatcaattttgaatccctgataatacacatattctgacacaggtacttcttccggaacttctgttggaatttcttcctgtatcacttcttcttgcggaattgtatttccataatcctgcgacccggatatcgttggctccataactgcaggctgctgcaccagactttgcactgtttccagatcagttctttcactttgctgaaccactgccagcgcttcttctcctgttttctgcaggttgtccgctgtctgtatacctgtataaactctgatactttcctgctttgcagcatttcccatctgagccgggacactccacaatatactctcatcctgcagcctgcagtacatgtttgcacgatcttgtaaagaaatatccggaatgcatgttccaattccaaccagcaaaccaatcgtcacaattcctgccgttattttcttcaatctgccttgtatattctcaacactttgttcctccagaacacaatcgccgcttattctcattctttccctgttctccctttttctctttggtacgcgaaaaaggaatgccgctcttatgcagcactccttcttacttgtcttccctgacaattacacattgatctcagcttttaccccgagaatctctttattttcctccagaagcggatagatcacatgattcaggtatgcctccacctgctctttcgcacggcctacatacttctgcggttccatagtctcttggagttcttccaggctcatattgaacgcaggatctgctgcgatcagttccagaagattgttatccaaacctttttctttgacattgcgtcctgcttccatggaaagctcacggattcgttcatgcaattcctgtctgtctccgcctgcctttactgcatccatcatgatgttttcagttgccataaacggcagttctgacatgagacgtttctcaatcactttcggatataccacaagaccatctacaacgttcagacacaaatctaaaattccatcaattgcaagaaatccctccggaatactaagtctcttattggcggaatcatccagcgttctttcaaaccactgtgttgcagatgtaattgccggattcagtgcatcaatcatgacatatctggaaagggaggcaattctctcacttctcattggatttcttttatatgccatagcagaagaaccgatctgcgttttctcaaacggctcctctacttctttcaaatgctgaagaagacggatatcattggaaaatttgtgtgcacttgctgcaattcctgccagtacgttcaaaactctcgtatccacttttctggaataggtctgtcctgacaccggatagcatgctttgaatcccatctttttggcgatcatcggatcgatcttatcgatggtctcctgatctccgtcaaacagttctaaaaagcttgcctgtgttccggttgttcccttggaaccaagcagttttaaacttccaagaacataatccagatcttccagatccatctcaaactcctgcatccaaagcgttgctctttttcctaccgtagttggctgagccggctgaaaatgtgtaaatgcaagtgtcggctgacatttctgcgcatctgcaaattttgccagttctgcgatcacattgaccaattttgttctcaccagctttaaagcttccgacatcacgatcatgtccgtattgtcccctacatagcaggaagttgcacccagatggatgattccctttgcctttggacactgtacaccatatgcatatacatgggacataacatcatgtcttaccactttctcacgctcttttgcaacatcataattgatgtcttctgcatgcgctttcaattcttcgatctgctcgtctgtaatattcagccccaattccttctctgtctctgccagtgcgatccagagttttctccaggttctaaattttttgtccggtgaaaagatgtattgcatctcacggcttgcatagcgctcggacaatggacttacataacggtcattgctcataatcgtattctcctttttccctattcaaatgccagactgatatcttctcccggcacttccatcggatattttcctgtaaagcaggcatcacagaatttcaggtcgcctaccatatctttcaatttttccacttccatatatcccagagagtctgctccgatcatctcccggatctcctctgttgtatgagagtgtgcgatcagctgctcattggacggcacatctgttccaaaataacacggatgtaaaaacggcggggagctgattctgacatgtacttctgtggctcctgcctttttcagcatcttaataatgtttgcgcaagttgttccacgaacgatagaatcatctaccattacgattcgtttgccctttacaacttccggtatcacgttcagcttgatcttcacactggacacacgctcactctgttttggtttgataaaggtacgtcctacatagctgttcttatgaaatgcagttccataagggattccggattgttcggcatatcccattgcagctacaagtccggaatccggcacacctactaccagatctgcatcaaccggataagactgcgccagtgcttttcccgcaacaagtctcgagtgatagacacccacgccatcaatcgtactgtctgttctggcaaaataaatatattcgaaaatacatcttgcacgtctttcctccggcagtgccatactcatatctgaagacatgccatgctttgtaatacttacaatctcacccgggagaacatctcttacaaattccgcaccaactgctgcgatcgcacagctttcggatgccagaaaataggtgttgtcccgctttccgatacaaagcggctttagtccaaacggatccctcgctccgatcatttttcttggactgctgatgaccagtgcatatgcacctttgattttcttcatcgcatttttcacggcatcttctgctttcgaaacgttcaggcgctctcttgccacatgataagcaatcacttctgaatcgatcgttgtctggaaaatcgcaccggtcttcgacaattcctcccgaagttccactgcattgaccagatttccattgtgtgcaatcgccagagttccttttacataattgattaccaaaggctgtgcattctctacacgagtcccccctgccgtcgaataccgtacatgtccaacgcccagattgccttttaattcactcaatgtctcttcgctgaacacatcgtctacatgtcccaggcctttacgtgacaggactttgcgctgtccatatgtatcagtcactgcaataccgcagctttcctgtcctctgtgctgaagtgcaaagagtccgtaatagatggaggacgcaacatcatttccgtccatatcatatgcgccgaacactccgcattcttctcccagccctgttaccactttttcaaaatcactcatggatgaactccttctatttaattccaatacgtctgaagacttcctgatatgcgtcttctacatttcccatgtctctgcggaaacggtctttgtccagcttttcatgtgtttccttgtcccacagacgacaggtatctggagaaatctcatccgcaagtatgatctgatcatggaaacgtccaaactcaatcttgaagtcgatcagttcaattccagcctcatcaaagaattttctcaatacatcattcactttaaatgtgtattccgtgatcttatcaatctcttctcttgttgctgccccgattgcaattgcaaaatagtcattgatcatcggatctccgagatcatcatttttatagctgaactccaaagtaggtgctaataattttgttccttcttcaataccgagttttttagaaaagcttcctgctgccacgttgcggacgatcacttcaagaggtacgatctccacttttttcactgctgtctcacgatcactgagttcttctacataatgcgtcggaactccttctttttccagaacctggaaaatatagttcgtcatgcgattgttgatgacaccttttcctacgattgttccttttttctctccattaaatgctgtcgcatcgtctttataatctacaatcacaacgtccggatcttctgtcgcaaatactttctttgcttttccttcgtaaagctgttctaattttttcatacgttcacacctgtcctttttcttaattttcattcactcgatctgggattatcggcacatcccgcagatagattataatacaaggcagagggaaaatcaatattccctctgccttgtatttcctgtcgcttattatttattccccgatcgataaataagtttttcttatatattgtgctttatttatcactttttgcattttttctttgaatttttttgcacattttctattttgcagccaacggttttttcagaagaacgattccaagcattgctacagctgaaccaactgcaactgctgccaaaaacaacaacgggttatcgatgatcccgatcacaaagacacccccgtgaggagccctgcttccacatccaaacaacatcgaaagggcacctgctgctgccgaacctacaatacttggcgggataatgcgcagcggatctgacgccgcaaacgggattgctccctctgtaataaaggaaagtcccatgataaaattcgttgccactgtctgctgttcattttttgtaaatcgatttttgaaaaacattgttgccaatgcgattccgatcggaggaaccataccgccagccataaccgatgccataattccaaactgtccgcttgcgatcgaagctgttccaaacacataagccgccttgttaaacggaccgccaaagtcaatggccatcatccctccaagtaccgctccaagaagtactttactggattctcccatacttgccagcgcatgattgagccactcattaaacgcgccaaccggcggattcactacaaacaccatcaacgctcccatcgctgcgattcctaagaacggatacaacagcatgggttttgttccttccagagatttgggaagcttttccaaaatcttctttaacccaagcatgataagtcctgccacaaatcctgcgatcagtgccccaaagaaaccggaagatacccagtccgcttcttctgctgccattgtcatcccactttttgcaagaagaccaccaacgattccgggcatcagagcaggtctgtctgcgattgccattgcaatataacctgccaggatcggaaacatcattccaaaggaaatatcccccacctgtttcaggaatctggaaaatgggtttcccacaccaaattctgctgttcctgcatgtgcaccgtcaaataaaaaggccattgcgatcaaaattcctccgccaatcacaaacggaagcatatgagaaactccgttcatcagcgccttgtaaatttttcttcccagactctcttcttctccgccaaagccggaacctgactccccggaatcattatgatagacagccacttttccactggttgcttctgtcagcaactcctccgccttgtggattccattggcgaccttggtggtgatcaccggctttccgttaaacctgggcatctccacttctttgtctgctgcgataatgatacattcacatgctgcgatttcctccggtgtcaacacatttttagctccaccagatccattggtctctaccttgattgaaattcccatctcttttgccttgttctccagactttctgccgccatatacgtatgtgcgattcctgttggacacgcagtgactgccagtacccgatacccttcttccggccggatctgctcctgtttttcttctccatattcttctggaaatttttttcgttctgccgcatcaatgcatttcagaaattcttcaacattttttgcgtccagcagatccaaacgaaattgatcatccatcagcagcatagacagacgactgagcacttccaggtgtacattatcttctgtattcggcgccgcgatcaaaaaaatcatatgtaccggctgtccgtccagggcatcatactcaactccctgcggaaccagcatcgccgcaagtcccggtgcactgaccgcatccgtttttgcatgtgggattgcaatcccttccccgattccggtcgtaccttcttcttctcttttgagcacaccttctttataacgctgcagatcacagacatttccgccttttgccatcaatgccaccatctggtcaatcgcctgcgccttgctctcaggggttccaagtagttctatactttcccgctttaaaagatccgtaattttcataccttttcttctcctttcaaatctgatattcgctgtaaggtctgtccagcaattttacaatatcctctcttggtgccagccaggactgaaatgcagttgcacttcctgctgcagttccaagttccagtgctctctcataagagcccgtattgagatatcctgccagaaatcctgccaccatagaatccccggcaccgacagaatttacaaccgtgcccttctgcgggtgctttttgtatatctcaccgtcctctgtcagaagaattgctccatctttcgccatcgaaaccagcacatttctcgctcccttttcctgcaatttttttgcatgggcaatgatctcctcttccgtggtcaataccgtctgaaacatttctcccaattcgtggttattcggtttgatcaagaacggatgatacttaagtacatttaataagagatctttcgttgcatctacaacaactttcacatttttatcttttaggtacatcaggatccgctcataaatattctccggaagcgtcgatggaatacttcccgccaaaaccagcacatctccactctgcagaactttcagtttttcgaacaactgttgtagtgcactttccgtgattttgggtccctgcccattgatttctgtctcctgccccgcattgatcttgacattgattcttgtctgcccctgtgcaagggaaataaattctgttttcgttccaaactctgccagcatctcctgcagcgcttttcccgtaaatcctgctgcaaatccaagcgctgtactctccagaccaagattcgaaaggattacggaaacattcactccctttcctcccggataaacagcctcgcttgttgtccggttaatttcaccaggtatcaattgttctgcctgcaccacatagtctaatgatggattaaatgttaccgtgtaaatcatgatttatacctcctttatatttctatatgttcgaaataccggatcttcaatatgatctgtaataattctggcatcctcaaactgtgcaaatgtaacggatgatacatgaccgaatttgctcgaatctgccagaatgtaagtttccttacacctcttcatcgctgcctctttcaccaatgcctcactgatatccggtgttgtataccctttttccggatgaattccatttgttccaaaaaagccttttgtaaaattgtacttattcagccattcgactgctgctccaccaactaaagcctgcgtattttccttcagttcacctcccggcaaaaataccctgcatcctttttctgacaggcatttcgcatgctggatcccatttgtcacatacaccgcctcctgccgggtaacagcctctgccaatgctgccgtacttgttcctgcatcaatataaacaaaatcctccgggcagatcaatgatgccgcatacattccgatcctgcgcttctcttctacatataacgcttctcgttcggatacctttgcatcctttgtcgtatattcaagatccgctgtcgttgcccctccgtgaactttcaccagtgcccctcttttatgcagctgtgtcaaatctcttctgatcgtagattctgaagtatccaaaagctctgtcaactctgtcactgtcactgtctttttttgatttacaatttttagtatctcccgaaatctttcttctgccaacatttccatcaccactttcttcattttcagtcatttccgttttcttaaattcataatataatcattttcagtcaaagtcaatcattttatttcaaaaaaagtatccaaatctgatcactcaaatttggatacttttacgaatcgctatatatgacttcttcgatattgttgtttccatttgtccgtcagcggctctgttacatctatctgaacgttctcccgaatttctttcatctctctgcgcagttctgtattgatttccgcatatgtatcattcttcgtaagaaggatgtgatactcttccatagacatatatttgtaagacgcatacaaatagggcttcagcaatttgggatcttcgcagatctgatatgctctgtcatacatccttgccgcctgctgatagagaaacattcttccatatgcagaccccagacttgcataaatctttccataaaacttcggatcggtattttcatcctcaccttcatttaaaattgcctgatataccagaattgcttcttctacttccccgctttccagaagattgtcccctttgtatttctgacgctcaatatccttttgatttttgagccgttctaaaacattctggatccgaatcatttctgcttctttgtaaattccggagctctttaaaatcgtgagtacaaatttttcaacacttccccgcatccgaatcacatcacgaagctgatctgcaagctccttttttccgatttcttcttccagccagccacacagttgttcgttcatgatcgtatagtcgatcaggtagaggttgttgcagagataataacacaattcttccattgtaaatattttacagtggattctcgtaatttcatacggatgggccgcatgctgatcatgacatagaattaaacttcccatcatttcctcctaaatgtataatcttctcttcctgaaagtctgtggcagggaaaaactctccgaatcccatatcgcgcactgtgatcttacatgttttttcgtctaaaaacaaggtctctatctgaagccgcatggaatattctcctctttttggaaatcctccaagcggaatcacttctgtctgcaatgtgccctgcaccagtgattcaacatgaagttcaatatcctctgtatcctccaaaagcacttcccactgattattagactcataccagtgagatccccaggatacgataggataccatatctcctgtccatttacgcgcatattcacagtaatctgatctgtcagtttgtcctcggaaagataaaccggatcttccacatgcatgaacatcttccggtatgctgtatagcaggcgcctttgctgtacaggttattcccaataaacgcccttcttccgttgcacagcacacgaagcgacgtcggataccagttattttcaaatccttcccctgtcaaaaacacggaggacacaatacgtttatcaaatacaccttcaataaatctgcagaatctgatatctgcatcttttgccttgtctgcattgagcacgggatagactgccgccagttctttcatgtgtgcacttgccacttcatctactgtcacaaaaacagtttttcctccacccagtcctggcttcagtcttcgaagcatatatgctttaatctcgtttctgtcacaacaaaacaatgcagcctcatactgccagagttcttttggctgataaaacaaataattgcaaaagctctctttgtaatcctgtataaaaatgtgacgcttgtctatcttcatccgtactgcgattccccgcagcatctgtgccagctcttctgtcagttccggcacactaaacacaattccatcaattttcgaaaatgactgcagtgaaagctcaatgaacttggcaagaagccagactgcctcatacgcttcttcaccaaactcaattttttcacctgccagactcttatccaaaagacgattgaccgtgaatccttctttcaatgaagccagacgctttgcttcctttccatatgcccaggtatccctcagctttccaataaccagtggaatctgataattatccgcatctatctccattgtttccggctccgccatctcttcattataaaaactgatctgacatgtcttttcattgatctcgtaacctataatattgccttgtcccataggagtcagcctccttaatactgttcaaacatatgtgccgcaattgcatcttcctgcgcatatgccttcatcttttcttctttttccgtgccttctgaaagtaaaatatcattcaaacgcccatatcgtccggattcgccaaatacagcttctttcgtacagcactctttatcgctccgatatgtatttccgtcgatcgtctctttgaaataatatttcagccgttcattggaaaacaatacaaatttcttcacatagagattctcatacatcggtgtaagtacctctgttgaataatccactgcctctgaattttctttctggagctgataatacaacataacacggcttcccttctgccccttatattcgatcagcgtcttatcccaaagctgcagttcaatgagccattctttttcataagtcaaaaagaacgggaaataaatctgtttgccgcacaactcctgcaaaaacttctttaacgtttttcgaacagtcgttgtatactctcttgtggagtaatattttaacactgcaatcttacagatatcaattgtctcttcgcctttttcatattctttgcagatgatatcaatgatacttttgctcatccgccgctcttccaccacatactctctggacatgtatgccagataagcctgctgcagtctgaaataagctccctcttcataatattcttcaaaaatcggaacttcaccgaacagttcttcggaaaacaacatctgagtaatgatccgctctgccagcttctgtgtatgcacttcatactctctcgcctctctccagagcatcttcatatccgtagtcgccccacagtaataatttgcaagataagtcaaaatcactcggtcaaactgttttcttttgaacatttcaaagcatacataagtcagaaagtcatcacattcgtaattattttcccgaattgtacggctgcacaatcccataacttcgtcttctttataattttcaattccatacttacgtacagcccccagggaaagctcctccactttttcttcctgtctgtttcgctttacagtattcatatatctcttacagatgtccatatagcgcaattcatagaataaacgcttactctcatatggaacagaatctgtataatgtcttccctctttgctttcccacacaagacggtctgtcttggcatacaaaaaaacgcgtgctcccttgtctgtatatggcgctttctgagtaatcgttccatcctcggcaattacatggataaacttcatattcggaacttttgtcgtgatctcatacgcatgacagatatcgtaaagcgccttgatctgttccacttccatagagtcttctgtaagaaaacgcttatatataatacgaagcatcggatcgatatttcttcgttccagctgattccatgcaaacgcttccatctcatctctatagtgcgcataaatttcactggactcgtcctcgtacgtgatcagatttgaatataacagggcttttttatgtaaatccagattgtttccatgcataaaatacaaatagaccgagcgcggcagcgctttattcactctgcccggctgaatcgccgccatataaaactcatacagctgtgcaatctttaattctgactccaccgctttttcataccatttgaaataacagttttccatacaatttcctttgatcagaagagtacagattgctgtcaggatcatcgattcttcgtacatgccataagaaagcaccagtgtttcatagaggtaccggtcaaaacttttcaactgacttgccaaattggctgtatataatgccagctcttttgtcatcaacttatgctttgccgcaaaatacagcacctgaacttcaaatgtccccagttttttcaaagaagaactcttttctttgaaacaccagaaagcttccagataaaaccagatactccgtgtcctctcctcgtaaaaatgatgttccaaagctctaagccgctcactgatgatcttatattcagaatccacgtttacaagcatacaaagtatcttccaactctccgggtgcttcatgtgtgatttggaaagttcttctgccacacgccgtgtaccgatggaatcgttggaaagcaatgtagtaagatacagataatatgaactgatctctacattctttccaatcgcgaaacgattgtaattataagattccagaatccattttgcctcttcaaaacgtttcccaagtaaacaaatatgtgcatgtaccagaagatacatctcattgtcctcatccaggcttctcaaatgttcgatcttctttatggactcctcacaccaggtgttgatatccagcttgccgctctcatatacaagataacgacgaagaatacttgcaaactctttatcacggtctcgtctttcttcctccctgcagacatccttctccactacgatctcatacgtcagcgtttcatatggagattccagaataatctgcccgaagttgctgccctgatgcagctttgcataatcaataatgtattccagtctgtatgcatttccaataaactcttctgtcgtaattttcgtatgctcgacacttaagaatgttccttctgtccgtacatcaatggtcagatagccccatgtatttttcttgatcgtaaaagtatcttttctggattcctgaagagaaataaatgcccggctctcctcttccaatgtcaaaaagatcttttctttctgtttgcagcccaccagaaactcctccagtgcctgctgatccagctcccattttctcatattatcgtataatgcctggatccgcttgtcctcatattttaagatttcataaaaatcccgggagcgaaaaagcttttctgcttctgccggatctcgaaacgataattttttgaaatcttccagactctgtacctttccgtacgttgtcatcacaaatggtttctcaatgatggccgtaaatgccacctcatattctccgccattgcatacaatggtaaatttcccgtgctctacatgtcccggaaccaaccctgatccatcataggtataagaaatattcaccggatttccgtcgaatccctgctcctcacagtgcacccgaaaagacgatggatacaccagcccacggatcgtcccctctccctgattctgaagagaaaaacttcctttgtacatctcgccttccccaacacgcatgatgatccgcgtctcaggaaaaataatctccggctgcggaatatgaaaatctccttttgaaaggcgtttaatcttattcttcaaattcgtcacctgctcattcttcttacgttgcatttttttgtaaacacactataataagttattataacatcaacactatatttcttgcaatggtgaatcaaagattttaaaggaggattgtatacatgaatacaagaccggattttcatggaagtgatattgaaaaagtatgcgaatattatggattgaacaaagataccattatcaattttggtgccaacgtcaatccccttggcctttcccgccatgtaaaagaaactctcgcaaaccacttggatctgctctcttcctatccagatcgggactatcaggcactccgaagtgtcctttctgcatactgtcagattcccgctgattttatcttgcccggcaatggttccagcgaactgatttctctcttgatcgaagaacgtcatccccagcatacgatgatcctcggtccaacttattctgaatattccagggaattgggattttcagacagcacgatcgactatttttatctgaacccagaacaagattttcaactgtctgtagaagaactgtgtatggctttatcccaaaagcagattgattttctcattttatgtaacccgaataatccgacgtcttctgctctttttcgtccagagctaatcaaattgctgactttttgccgagatttcaatatttttgtaatgatcgatgaaacctatgtggaatttgcgcctgatgtagatgccgtctccgcagtatctctgacccgggactttcagaacctgatggtgctgcgaggtgtttccaaattttttgcagctcccggaatgcggttcggatacgggattaccgggaatgccgcattcctcaaaaaattgaaagacaaacagattccatggtccttaaacagtcttggcgcatttgccggggagcttttatttcaggatgatgattatataaaaaagacacgcaatttgatactgtctgaacgtgaatacatgtatacaaaattgcgtgaacttccttttttccatgtttatcctgcatatgccaactttattctgctgcagattcaaaaggatgggctgacctctttctctgtgtttgaatcctgcattcaggaaggtcttatgatccgggactgctcctctttcagcggattggacggacaatttgtccgtttttgcatcatgcatccaacagacaaccgaaaactgcttgccgtttttcaaaagatctcacagtctgatttcttatgatctgcacttacatccactacccgattccagatcgttcccactgcattctgatagaacgctgccggaagaatgcagtggggatcattttaatgaacgaaatccagaatccgacctcggtttcttattttttcagccaaatataagattctattttcttaatcctcaaattctttgatcatctgccgatattctaaatactcatatcccaatcttttgtagagcgcactcgctcttacgttatcatcctctacctccagtcgaaaccgtgtcaccccttcttctctgtgttcctccatatactggaaaaacgcactgccaaatcctttggaacgatatgcctcccggacatacaattcctccagccaatctacatatcctcccgcttcctgtgaaaatgtcctggctgtcagtccatatccggcatagtttccctcatattccagaatataacagcctacatatgtatcatttctcaaatactcatcaaaagtacgttcaaaatatgcatccggtataggatgtaaaactgccggagaatgataaaactcatgtgccatcctgatatactcttcccggtctcttctttccgcttttctgatcatcattgaaaatcctctctttcttgttttctgcatcttggaacatatcttaccatattcccggttcatacgcccctctttttttacattttttacaaaaaagtaagaatcgctttctcctgaacgtgctataataaaggaaacaagaactgacaatcatatacttcaagaaaggatggtctttatggaatttacagaaggattaagaaaagtatttctggcaggcgtgggcgctgttgccacaaccgcggagaatgcaaaagagctgatcgatgaccttgtggaaaaaggggaactgaccgtcgcacagggcaaagcactcaacgaagaactgaaatatacagccaaagaaaaagtcaaagaacatatttctgtcaccgtcacaaaaaattacacagacgctctgaattccgttgaacaaatgacagaagaagaattaaaggctctgaaagaaaaaatcgcacagacggaagaatcaagaaaagagcagacggcagatgaggacacaactcccgatgaaaggacttcagaagaatcagaatgagcaaagaactagaaacaatggatccttcccagtatccattacaggaagaaaattcagccgcctccggcaggcggctgaaagaaattttacacgttttaaagaagcatcatctgacttccggtctgacgccggtaaagctccgtgagattcttgaagatttggggcctacatatgtcaagctggggcagatcatgtccatgcgttctgatatgcttcctgagatatactgccaggaattaacacggcttcgtaccgatgtgattccaatgccttatgagactgccgtctcaatcattgaatccgaattaaaacgtcctgtttccgaaatttttacttcgatcgaagaaacgcctcttggttctgcttctattgcacaggttcatcccgcgcaattaaaagatggaacaaaggtcgtgttaaaagtacagcgtccagcgattcagatgaccatggaaaatgatatccgacttttaaaaaaagcatccggtattttaaaactgacccttggaaccaataatctgatcgattttaacaccattttagatgagctctgggaaactaccagagaagagatcaattttgaaaaagaagccgctaatctggatctgttctatgcaaatcagaaagatgttgtttatacgacttgtcccgtagtatatcatgaactgactactcccagactcctcgtcatgaactatattgacggaattcagattgatcatattgaagaactaaaagcgctgggatatgacatgacagagattggagcaaaaaccgcagaaagctactgcaagcagattctggaagatggttttttccatgcagatccacatcccggcaacctctggatcagtaaaggacagattgcatggttggatcttggaatggcagggcatctctcagccaacacgaaacttctgctccaaaaagcaatccgggctcttctggaaaatgacatttattccctgaagaatgtactgctggcatttgccgaacctcaagaacgtgtgaatcatgcccgtctgtatacggacattgatgacattgtcagcaagtacgtgtccatggattttggaactatgcggttgggggatctgattgaacggcttttgcagctggtcaaggatcatcgtcttgcgatcacaccagatgtcacgttgcttgcaagaagcatgatcacaattgagggaactttaagcgcctgtgctccggatgtcaatctgctgcggattttatccgttcatatgtccaacttactgatccgtgaactggatgcaaagcaccttttaaagcataagggacgccaggtatatacttctctggataagtcactcaatattccggcccaactgtccgatcttttgaatattacgaaaaacggacaggcacagatcaattttcagttatctgatggagagcatttccgccgcgatctctattccattgccaatcggatacttctgacaattctcgctgctgccctgtttatcggagccggactcgccagtgatatttacagtatccccagttggttcggacttccgtggatcagctttgttggatattgtctgtctgcatttttactgctgatcgttctgatacagattttccggcgccgcagatagcagaaaagggagaagcctcatttttttgaggatttcttctcccttttaccgattatttttctgaatcagttgctgtctgtttgacactcacaccctgatcttcaaagtccactttcttccattcttttttgtctactttgatgtctgtctcttcccgccatgtttccagtttttcttcgtactgtttctgcttgcgctcttctacaatctcttttttcttcttatctgttgcttcacgatccagtttgcttgtcagttttgccacgtagattccattgtcagtctcaataaggcttgtcacatctcctacattttccagggcatctgccgccttcaaaagatctgcgttcaaagtactggactctgagtcaaaggtggctgtctgcacttctttttccgctgatgctgccgctgcattcatatccttgttctcggctgcattgaccgtgtcgagaaatgtctgagctttttctttttctgccttcttttcatcctctgtcatctctgctgactgcccggaatcatcggtctttgtataagcaaactgcacatattctatcttcttctgtgctgcgtcttcgtctgacacattctcatcaacaccctttttcagcggtgcatccatcttctgcatgatcgttgcaagctgcagatactccttaacatatttctgatatccagacacaacttctttgtcttccaatgtattatcttccacaaactgttctgccgctttgtcaatctttttcttttctgcatctgtcaattctactttatattccgaagcatgctgtttcacaagatacatattttccagagactctaaaatgctgtctttcatattttcttcgtatgtcttgtcctcttccacttcctgactccacatcgtatttgtatccattcccatcatgcctgcgtaaaatgactcgtactgcgcctgctgcatacgtgcataaaaattagcaacgccgtaggatactttttcatttccaaccgtcaccacagttgcatcattatccggtgcaacactacagcctgtcaccatcgtcactgcaagaattccggcagcagccagcgcacattttttctttaatccaaccataagctcctcctctaattgtacctaattattacattataacgtttttttattcatctaacaagctctttatatcatttaacagctttttcacaagctctagtacattttcatctttttcttttttgttttttccttttttatggtagatgaaacatggtgctccctctgttttcaataagagacttcctcgatatttctggatcagtggcggaattttctgtggattgactcgtgctttctcatacattgtaaaccggaactcttctcccttttgctctacttctgtgacataagcagaatgagccagcgctttgagtcccgcaatctgcagaagctgctgtaccttcctcgggacatcgccaaatcggtcgatcagttcttccagcatgtcatccatctcttcttcgtcttcaattcctgcgattcgcttgtaaatatccagcttttgatactcattcggaatataggagtccggaatataggcatccacatccagatccatcactgtcgtatagatttcctcttctactcctccttttagctgtttcaccgcttcattgagcatcttacagtacagatcatatcccactgcctccatatgtccatgctgttctgctcccaaaaggtttcctgctccccggatttccaaatccctcatagcgatcttaaatccagagccaagatctgtaaattcccgaattgcagccagtcttttttctgccacttctttcaataacttatctctccgataaagcaaaaatgcatatgccatccgattagatcttcctacccgtccccgcagctgatacatctgagaaagccccagtcggtctgcgtcatggataatcattgtatttgcattggaaatatccaatcccgtctcaatgatcgtggtggaaaccaatacatcaatgtccccattgataaaatcatacatgatattttccagttcatgctctgccatctgtccatgtgcaaaggctaccgcagcctccggtacaagtttttgtatatgtccggcaacatctgcgatatcacttacccggttgtacacatagtatacctgaccatcccgatccaattctctttgaattgcttcccggaccatttcatcattgtactccataacatacgtctggattggcattctgtccatcggagcctcctccaatacactcatatcacgtattccgatcagactcatatgcaatgtccggggaattggcgtcgccgtcaatgtcaatacatctacattttccctcagctttttaatcttttccttgtgagccacaccaaatctctgttcttcatcaatgatcagaagccccagatctttgaattccacatcttttgacaacacacggtgtgttccgatcagaatatccaccagaccttttttcaaatcttctgttgtcttcttctgctgagcaggcgtccgaaatcggcagagcagatccacacgcactggaaattctttcatcctctgtacaaatgtattataatgctgctgcgcgagaatcgttgtcggcaccagatataccacctgttttccatcctgaatcgccttaaatgctgctcgaattgcaatttctgtctttccgtatcctacatccccgcagatcagacgatccataatttttttgctttccatatcctgtttcgtatctgcgatcgcctgcagctgatcctcagtctcctcaaacggaaacatctcttcaaattctttctgccagaccgtatccggttcgtactgatatccattttcctgctgacgcactgcatatagttccaccagatcttttgcaatctctttgacagccccacgcacctgattctttgttttcgtccactggctgcttcccagtttgttgagctttggttttttcgcatcggcccccgcatacttctggatcaaatctaactgggttgcaagaatatacagactgcttcccccggcataagagattttcatataatcctttgtaatcttatctacttcaatcttctcaatgccctggtaaatcccaagtccgtgattctcatgcaccacataatcaccgacttttaattccgaaaaactgtggattttctgtccttcgtataattttctgcgcttttttttcttctgacggccaaaaatatctgtttctgaaataaccataaatttcaacatcggatattcatagccctgcgtcacatgaccatatgccaccataatctccccgggctgcacctgccgttccatatcctcactgtaaaaactactcaaatcgtaatctctcagatcttctgccaggcgttttgcccttgtcctggaaccggataacaaaatcacacgatactggtttctcttcaaacgctttaaatctcttgtaagcatctcaaaactattattatacggattgaccccttttgtctgtatataatacgtctctcttaccttgaaccccttgcatttcccttccagagctgtaagtgccactccataaaaacgattgatccgattcaaaatctcctgcaccggataaacagtaagctcctgtgtctcttctattcctgcttcttcccgcttgtgaatactctcctgaaactcttcctcaatctcattcgctttctcaacgagcctctgtggttcatccagaaacaaaatcgatgcttctgttggaaaatattccaaaaatgactgtttcgttggactttctaattccgccgccgggtagatctcgatttcctgcagattttcaatcgaacgttgactctctacatcaaatgtacggatggaatctacttcatctccccaaagttcgatccgcacaggcacctcttctgtaagcggaaaaatatccagaatcccgccgcgtactgcaaactgtcccggtccttcgatctgaacttcccgcacatatccaagatctgcaagcttttcctggagtccggtaaaatcaaccgtatcccctgatgcaatccgaacccttctggaaatgatctcttctgccggagaaagtccatccagaaacgcatccatggtcgtgatcactgtaagctcctgatccacctgtttttccacaatactgcggatcacttccatccgctgtttcatcagatagtttcctttgatatctgcatgataaaacaataaatctcttgccggataatacaacactccagaatccaaaaagcgatattcttcatatgctttctgcgctttttcctcactggaaaaaacgatgatcttataagaaaaaccatcgccaagtgcatacatcaaatgtgttttttgtgaattgacacagcctgcaatctgcagaatcccctgttctttctttcgcttctgtaaaatctcctgatattctgcaagttccacaagcggtgcgataaaagcctgcatcatcttatttttccttcttttttcgattatactcattcattgcagcctcaatattgcctgttacgatctcttttactgcacagactgcatgttcatacccttcttccatctgttcctgttcttcttttgaaaaatgtcccagcacataatctgccagatcccattttggtggtttttcccccacccctactttgatacggggaaatacctgcccccctaaatgtgcaatgatatttttgattccattatggccgccggcacttcctttcgcccgaatccggatctgacctactccaagactgatatcgtcatagatcaccaacagctcctgctcttcatctactttatagtaatccagaagacttctgacactttccccactcagattcatatacgtctgcggcttcgccagaataaccttctgcccctcaatcattccttttccaatatacgctctatgtttttttgtatctacatcaatattatatttccgtgccaacgcatctattacttcaaatccgacattgtgtcgtgttccttcatattccggggtcggatttccaagccctacaataataaacatatctgtcacctcttctttttcaattttccctgttaaactgcgttacttattgtacaggattccctgtcgtttgtcacgcaaaagacgggaatattttccggatgtattacataaaatgataaaaaacaagggggattattcttatggattccaaaacaaaaatcgttgttcttcacacaaaggaactcatttacaccgcagtgtttgcatttctttgtattcttctgatcatactgctcgcagtcatgtttggtcccggtcattccgacaaaaaccattccgacaaaaaacagtatactcccggtacttacacatccaccctcacactaaacaacaccaatctggaagtagaagtatctgtggacagctcccggatcaactccatccgctttgcaaatctggatgaaactgtaaccacaatgtttcctctggtacaaccggctatcgaagaactcgctgatcagatttacgaaacacagtcgctggacgccgtggaattgtccgatgacgcgccttacacttctcagatcattctgaatgccattcgccaggccgtagaaaaagccgcagtcaacaaaactgcggcttttacattacacatcttcgcttctctgttttatccttctacgatcaaatagcgtccgccggaaagctggaatacttcggaagcctcttcaagctcctcttcatccatattctccacatctgcaccgctctcctcaaaatattctctcacttcatccagagaatcgactacaactgccatgcagtcttccagaaaagcctctgcttcttccattgtctccgccaccggctcatcaaaaagctgtgactgtttcttcagaaacgtaagcaaacattcctcatcatattcattcatgcttcgttacctccctttttctcttcccatgtagatatcagctgcaaaagttcccggggtgtatccacaatatattctgcacccgcttcctctaagaccgctctgcttcgaaacccccaggaaacaccaatggtacggactccggctgcatgtccagtccggatatccacttcggaatctccgatatagatggtctcttttggagtcactcccagctcttttgcgatctgaaaaaccgctgtcggatccggttttcttggcacatcgtccttctgtccctgtacttggaagaacacatcttttccaaagacagtctccacaacacagaccgcctgtctgtccggtttgttggacaggactgcacttttgatcccacgatctttcaaggcatctagcagctgtacaattccttcataaggagtcacatgatacatacagttttcatggaaaactcttccataaatttccatggcttcttccagcctggtccctgcttcttttgacacggcctgcaaagatttctccagaagaaccctgcttccatttccaacaaacgtccggcactgttctcttgtgatccctggaagccccatctctttcatcgtcaaattcacagaaaatgtaagcgaatccaacgtatccgtcagtgttccatccaggtcaaaaatacagctcttatacaccatcgtctccatctcctccatctattctacgtgtttatcatagtatgaagtgctggaaatttcaactgttaaatcatttttatatggttttgtttcaaattttatcctaaaaggtattgtttcatcactttcaatgcatttttttccagacggctcacctgtgcctgtgaaatctggatctgatccgccacctccatctgcgtctttccctcaaaaaaacgaagttggataataaatcgttccctctcgttgagccgttccatagccgcttccaaagacaactcttctacccagttctcttccctgttctttcgatcactcacttgatccataatatacagcgtatctccaccatcactgtacaccggttcatgaagactgaccggcatctgaatcgcatccagagcaaatacaatatcttctttggagatcccaatttcttctgcaatttcctgtactgtaggttctttggaatatttctttacaaagccttctcttgcataaattgccttatatgccgtatcccgcagtgatctgctcacacggatagaattattgtctcttaaataacgtctgatctcaccaatgatcatcggaactgcataggttgaaaatttcaccagtcttgatggatcaaaatgatccactgctttcatcagcccgacacacccaatctgaaacagatcatctgcattctcgctgctggacgaaaatctcttgatcacactgagtaccagccttaaatttcctttgatatactgctctcttgcctcttcatccccctcctggatccttgcaaaaagttcttctttttcctcttctttcaaaagggggagctttgccgtattcaccccgcacaattccactttatttcctgccatttgtgaatcctcctgtctctgttctaattaagagaattcaccatcttgcaacagtctatgcggttttataaaaaataaaaaaagttttactccttgacagatcagaagtaaaagatcacggatgagatttctcccacccgtgatcttttgcttcttactactcccaacgatcccacttatcagcaaggttgttgatctgactttcaaatttagctttgtccttattcggaatgccttcccgtctgtaaatcacagccaacaatcttcttcctgcagccacaagacgctcaaacgcagcgtccgccttcttctgggacggtttcttgcctttcgccgcaatctgcacaccttcgctcaaaatctcatttgttatcagatcgacttctccattcggaaatggagcccatgcaggacatccgagtgcctcttctactttctgcgcaaattcttcggtcacagtatcttctccatgaactacaaatacatgctcaagcggagtcttaaatccctgaagccatgccatcagcccattcatatctgcatgaccactgatgccgtggagactttcaattctggcgtgaacctcaatcggctctccaaacagtttgatattcttctcaccttccagaagccgtcttcccaaagtaccgtttgcctgatatcccacgaataagatcgtacattcctttcgccacagattatgtttcaaatgatgacgaattcgtccggcatcacacataccggatgcagaaatgattactttcggcttttcaataaagttgatcagctttgaatcatcacttgtaacagaagtcttcaatcccggaaataccaacggattgatcccctcatctaccagttttatagcctcttcatcgaaacattcccgcatgtttttcgtaaatacctttgtcgcttcaattgccagcggactgtccagatatacttcaaaatcagaatattccggcagcagtccgcgctccttgatctcccgtataaaatacagcatttcctgagtacgaccaactgcaaatgacggaatcacaacattgccgcccacatcaaaggtctctttcaaaatccgtgtaaactcagaaacatagtcaatcttctctgaagtgtgcactctatttccatacgtggactcaatgacaacataatccgcagtatctgtacattttggatctttgatgattggctgatccaaattgcccacatcccccgaaaatacgattttctttgaaacctcttcttctgtcacccaaacctcaatgctcgccgaaccaagcagatgacctacatctgtaaaccggatctccacaccatcacaaatgtgaagtcgctccccatatccgcaagggaccaaaagactgatcgcagcttccgcatctgccatcacatagagaggctcaaattccggtactccggcacgtcttccttttcgatttcgccactctgcttcaaattcctgaatatgagcactgtctcgaagcataatgttacataaatctgctgtcgcaaatgtggtcaatatctgccctttaaacccattcctgcacaaaagcggcaacaaccccgaatgatcgatatgcgcatgtgttaaaaagacataatccacatctcccgctgcgatgggcagccccggattttcatacaggtccggtccctgttccataccgcagtcaattaaaatatttttccccgctgcctgcagcaaatgacaacttccggtcacttcatgggccgctcctataaaagtaagtttcatatagcttcaccacccttttttctcattataacacctttttaccagagtgaaagtactttttgaagattctcctgatttattcgtaacgcacaatttcacgctttaatctctgcataattttcttctccaaacgggaaatataggattgggaaattcccagcaagtctgctacttccttctgcgttttttcaattccatccggattgtccaaaccaaaacgcatcttgacaatcaacttttctctgcttgacaactgattgatggcacgcacaagaagctttctttccgcttccgtttccagatcccgataaattgtatcctcctctgttcccagtatatctgataaaagtaattcgtttccatcccagtccacatttaacggctcatcaatggaaacttccatttttgtcttgctgtttctacgcaaatacatcaaaatttcattttcaatacaacgggatgcataggttgcaagcttaatttttttcgtcggattaaatgtattgatcgctttgatcagaccaatcgtcccgatggaaatcaaatcttcgactcctacaccggtattgtcaaatttttttgctatgtatacaacaagccgaagattatgttcgatcaacatttttttcgcttcctggtcatattccgatccaagcctcctgattacttccgtttcacgctccgtctcaagcggcggcggcagtacttcggaacctccaatataatgaacttccttttgattcggaaacaataaccctttcaaacttggcactactttcaatttaaactgctgcggcattgctacttttacaaccatcttttcttcctcctaatatttcagggttgatgatcatctgatacatcccctgttctgatatttgttcctcacatattccgaccagcggttcataaatccactgttttttctgtataatatacattttttctaattgaaaaaccggcatgacaccgattttcccgactgtccgatatgggatcagccgggaatctttccttgcttcttccgccccgatcagcttttctattgtgcttctctctaaaatgcttaccagttttttgctctgaggatctctcagcacatttccggtatcccaaagaccgcagatctcgcaggaatttttatcctgatataaaacaatccggcacagcttctgttcttctttttgcagttgacacagaaactcccagactgtacggatcgtataataacaagcgatcacaacagcaaaatagagacttgtgtattttacataaggtttcagcattcccagaattccaccaatcaaaacagaaacaaaatacaatacgatatagctttttaaaaattctgaaaagctgcgaattttaagaccaatgacaagcatcgcactgctcacaagcagatgcgtcatcaccagctgtatccagacagacaactgcaaaaccactacaagacaggacatgcccgctccagccagcgctcctacaattactctttttacgcttcccggcagttttaataatgtctttactgataacaaaacgaaaacatccatcataaagttcacaaaaaacatgatatctatgtatacttcatagtacatgttccaccctctttctcgttggtactaaatcgatttggcactcaaacaagacttattataattagaattcttttgaaattttgtcagaaactgacagcgaaacagactttatttcgacagagattgtattgaattgaaaaaaggacagattttctgtcgaaatctgtcctctgtaactttattattttttaaagaaatccggaatcttaatagactgctctttgactgtacttgaaggcactcttccctgtccctgaagtgtaggaatcgtggaacttcccgcagatgttgttctgcctgcgccgtactctgcagctggtgttcttgcaaacttgtctccatttggaagaatcgatcccatcttctgctggccttccagtcttgcttttaatttggatgcacttccacctacattgtgcagtcctgttgcaattactgtaattgtagcttcatctgatcttgtatcatcatacatcgcaccgaagataatattcgcattttctcctgccaattcctgtacataatctgctgcatcagatgcatccattaaggtgatatcaccggaaatattgatgataacgtgggatgctccctggatcgttgtttcaagcagcggacttgcaacagcctgttttacagcctccagagccttgtcgtcgccgcggccttcaccgataccgatgtgtgcaattcccttatctttcataactgtctgaatgtctgcaaaatcaaggttgatcagagacggtacattaatcaggtctgtaataccctgaataccctgctgaagaacttcatctgctttcttcaacgcttccggcattgtcgttctgcgatctacaacttccagaagtttgtcattcgggatcacgatcatcgtatctacattttcttttaatttgtcaataccagccagtgcatttgccatacgtgtacgggattcaaaacggaacggcttcgtcacaacagcaactgttaacgccccctgttcttttgcaatacgtgcaactacaggcgcagctcctgttccggtaccgcctcccataccacaggtaacaaataccatatcagcacctttcagcgctgctgaaatctcctctgcactttcttctgctgccttctcacctacttccggctgtgctcctgcaccaagtccttttgtaagcttttcgccaatctgcatcaatgttggcgctttgcacaactgcagtgcctgtttatctgtattcactgctataaattctacacctgcaatctgctcgtcgatcatacggtttaccgcgttgttaccgcctccaccgactccgacaacaataattcttgcagctgcttctgattcattcgtcttaatctctaacaagggtagttcctccttcgtcgtcttatcaacttattttatacatcccatcataaatatgtatgaacaatagaatccaataagtatataatatagtctttcgcacaaataatcaatagatttttgtgtattttctgttttttttattcaatttcttccattccctgcatttcatcttcgccggccagatccacctgcgaaaccacctcttcttcctcctgagcctgatctgtccggccattttcgtcttctgtgcgttcttctgtttctgtcgctttttccggaacgaaacgcacggaagcaccggctgtctcataattttccagatgcagtacccccgcctgtcccgcaaactgttcattgagctttgccagaatcggtgatatctgcgcaatcttcatctcatagtttccttttccaagctgtacggtcaccaccccgaaaatcagattcactgcgccttcactgcaggtaagccgatccgaagacaactcatacttatttgaaagccttgtaacctccacgatccgttcaaaaatatcttcgtcctccaccggcagtttctgattcattttcaccttttccgcatccagattcaacccctcgataaatggtgctccgggaatcacctctgttgttttcaacgctgctgttccattctgatcaaaatacaaaaattctccctgataatcaaaatatccgagaaattccttttcttttacttttaatacgactgtccacggatttttaacagatactttcacggattcgatcgctgccggcttttttacatctccataattgtatttccaccagatatagatcgaatgaaatgcatatttgtcttcctgtacccatttcaccagtgtttcgtcctgacaatactgatttccggtcacctctatttttcttgtctgaaacagaagaaataccgcaaaaaacaatataagtactgacaaaactgtaatcagtgctgccatccgcatcttttttttcttttgtttcataaggcgtcctccttttctttctctgcctattctaccaaatcagacacacttaacacaagccccatttccaaaagcaaaaacacaaccgaagtgcctccataactgataaacggtaaggtgattcctgtatttggaatactgtttgttactaccgcaatatttaaaattacctgaatcatcatgtgtgccatagctcctgttgcgatcaatgccccggtcagatccttcgcatgtgtcgcaatcacaaaaaaacgccagattaagatcaaaaacagaaggataatgaagctggctcctaccagccccaattcttcacaaatgatggaaaaaatcatatcattctgcgcttccggcaaaaaaccaagcttctgtacactttttccaagccctctcccaaacagtcctcccgaaccgattgcataaagtccctgcagtgtctgatatcctttctcatatttttccggatttctccagatggccagacgctccaggcgataactttccaacgccagaaaaatccccataaatcccactgccgccgctcccattcccagaaattgcgcatactttggacttgccacaaatacgagtgccgctgcaatcccgagaatgatgatggctgtacttaaattgcttgctcctaccagccccactatcggcaatacagggagcatgatgcttatcagagttgtaattttcccaatcttccgggccttttttgagatcacacaagacaaataaacgatcactgccacttttgcaaactcagagggctgaaaagaaacagggcccaaagaaagccatcttttggacccattgtactcatctcctataaacatgactgctacagacagagcaatggctgcaacatatcccagctttgcaaaaggaatccatctgtgataatcaatccttgccacaatcagcattccagccagccccagcactgttgcaaacccctgttttttcaaatagtaaaaagaatcatgaaacttcaccctgccattatacgcacttgtgctgtataaaagcacaagaccgatcccgaccaggagcaatacgactatcagcatcgtataatcataccgctgtttttttgccggatgcttcaacacacatccactccttataattgatttacaagttctttaaatttatcgccccgttcttcataattcttaaacattccccagcttgcacatgccggagataaaagaactgcatctcctggttctgcgagttccacacaagtatgaacagcttcctcaaatgtatcggtcagtatcgtatctgtaaatcctaagcgctttgctgtctcattgatcttttcctttgtagctccaagaagcaccagcttttttacttttccatcaaaagaccggatccactcctcataggaggagtccttatcataccctccaccgatcagaatcgtcgggcggttcattgcctgaattcctttgatcgcagcatccggattggttcctttggaatcattgtaatatgcaacaccattcttttctgctacaaattcaatccgatgttccactgcggtaaattcccgaatcgtcctgcggatgatctccaaagggactttatatgctgccgccatcgccactgctgccattacattttcataattatgcataccaagcagttttaattcatccacatgacaaattttttcatgacaatagatgatatttccatcctccagataaattccattttccagactgcggcggctggaaaaataaagcacttttgccttcactttctctccaaaatttcttgtgacatcatcctcataattcagaacgcacacatcttcttctgtctgatttcttgcaatctgctccttcgcttcaatataagcctccatcgtatgatgtctgttcagatgatctggcgtaatatttaaaatcgcactgaccttcggacgaaatgtatggatcgtctccaattgaaagctgctcatctctgctacgatcacagaatcctcctttgtctccggtacaatactcgtatatggattcccgatgttgcctacgacaaatgtacttttccgataatttttcatgatcgcaccaagcagagctgtcgtcgttgtctttccatttgttccggtaattgccagcacatccccttttccaaggacataggccagttcaatctctccccagacaggaatgcctgcatcccgcatctgatctactacaggaagatctgtcggcactcccggactcatcacaaccagatccagatccgccagaatctcctcaggaaatgctccaagaacaacacttacgataccgtccgcctgcccttctatctgctctttgatctcacttgcatccagcttttcatttccatcatatagtacaacctctgctccctcctgcaataaaagagccgctgctgaaacaccgctgatacctgaaccaaataccagaacttttttctctttgaacctcatgtctatacccccattaatgcgatcagacaaagaagggctgtcacaatggagaatactgccacaactctcgtctctgaccatccgcataattcaaaatgatgatggatcggcgccatcttaaagaaacgcttccctccggtctttttaaagtatgtaacctggatcatgacagatgccacttccaccagatagaccaatcccacaatcatgataaacagcggcatctgcatcatatatgctgttcctgccacaaaaccacccagtgcaagagaaccggtatcccccataaatacactcgccggatatacattaaataaaaggaatccaagcaatgcacctacaactgcacaggtgatcggttctactccactttttgttccgattgcgactaccgtaaagaaagtggctaccagaacagtcacactggatgccagcccgtccagtccatccgtaaagttcgttccattgactgtaccgatcactgcaacaaacaacaatggaactgccagccagccgatgtcccagtactttccaccggaaaacggaatcaacatggacatcggaatatctgccactttgaacacataatatgcaaaaattgctgtcactaccaactgcagcgccattttctgctttggatacagaccgtctgaccgcttcatcaccactttcagataatcatccagaaatccaatcagcccaaatccaagggtcagaaataaaatcggaatcacttttggataatcctttacataaaacagagaagtgatgactacactggcaagaatgataattcctcccatagtcggtgttcctgctttttttaaatgagactgcacgccttcttctctctctgtctgtcccatcttcagttttctaagaaatggtattacgatcggcccaagcaccagactcagcgcaaacgatacgaataccggtattactacatgataactcatacttccacctcttcatctcttttgtttcaatatctcacttagtatacctcattacctactgtttttcaatcccgagatatggaaggacattgtcaaaaatactgcgaaggaccggcgcggcaatcgtacctccataatatattccctgcggattatggatcacgaccattcccagcacctgcggatcatctgcaggtgcaaatccaataaaagaagaaatatacttatttgcactgcgcggcagcgtctgggaagtcgctgtttttcctccaatagaatatccttctatatatgcatttttcccggaaccattggcaacaacgccttccaaaagctcctgcatcgtttccgatgttttttccgacacaattcctgcgtgttcttcataggataacgtttccaaaacatttccctgtccatccagtatggaggttccaaaatgtggagtcactcttctccccccatttacaatggaactgaccgtcactgccagctggatcggcgtaatctgaaatgactgcccgaaactgatcgttgccagctcaaccagtccgatgttttccacctgatgcatgatcgttcccgcttctcccggcagatcgatccctgtcagatccaaaagcccaaactgctcaaaatagtcgtaaaaccgttctgctcccaaacgcagaccaatatcaatgaataccggattgcaggaattctggattccctgtacaaatgtttcacttccatgtccgcccactttatgacaacggatttttctgtcctccaccatacgatatcccgggcaggaaaaggtatcttccggagttaccacgccttcttccagacaggcggcagatgtaatgatcttaaatgtagatcccggttcataagtatcattaatacacctgtttctccacatcgcatttaacgcattctgcaatttttctccggtaagattttctccattttgcaattcaaacggagcattgagattaaattccggcacattgaccatggagaaaatttccccgttttgtggattcatcaacaaaattgacactccctccgcctgtttttcctgcatcactttttccgctgcctgctcacagtatttttgaatattataatccatactgatttccagtgtcttccctgcaacaggctcaatccggtcttctgcaaccgcatccagttcaatgcctcttgcatctgtcgttgtcaatatcatcccgttgctgccctttagtatctcttcgtacttcacttccagaccaatgatcccctgattgtccccacctgtgaagccaagtactttggatgccagactgtcatacggatagtatcgtttatagtcttcatctaccttcacaccatccagattatattctctaatcttgtcgcctgtctctttcgctacatttgttttaactttttccatcgaggaaactttttccacccgcttctttacctctgactgttccaggttcagctcccgtgaaaggacttctgtcacacgctccggttctgtaatctgattatgaatgactgaaattgtacacacggtcttattagttgccagcaccactccgtttcgatccacaatttctcctctggcagctttgatcttgcgctctcttttatgcaaatcctcagcccgtttctgataatattcggcatcaaataccatcagatacaccaatcttccgatcaaacctgtcaaaatcagacatgcacatataaacactactaaaattttctttttatgatatgttttatttttcataaaaaaaccttacagaagactttatataacatattttatcttctgtaaggttattcctgtttattctgttgtttcggttgattccggagtcactgcccatccatcatagtccggctgataatccggatcaatgtaggcaccggcttcattgctgtacgtatcttcgtaatttgcatcaaagtcctgctgtacatcttctctcacaccagtatcttccggcaaaggatccccatttctcgtaatattcaaatacggaaaggcttctgccataatcttttgtgacaattccaggacataagagctcagctcttgatcctccacatttggttcatcaatcaccacataaatcacaacttccggatgctcctgtggtgcatatccaataaacgaaagaacataatttccagttcctcgcggaagcttctctgctgttcctgtttttccgccaatgtcatatccttctacattcgccggaacaccggttccctctgtcatcactgtacgaagcgcttctttgacacggtccgacgtctgtttggacaccgttttccgaagcagagtggaatcttttgcctggatcacatttccattttcatcctgaatctgtttcactacatgtggctgataataatatcctccattgatcagcgaagaaaatgctgttgccatctgcgtcatcgttacattgaaactctgaccaaaagaagatgtcgccagatctgtttctcccatattttctgccttaaaaagcaaattttctgtgtatgcctctcccggcagatcaattcctgtatactctccaaacccgaaaatatgctgataccggataaaatcttccacaccgattttatctgccattgccatcaatgcgacattacaagagtttgctatcgactgattcacattttctgtaccatgaccagatgtgttatgacattggatataccattcagccttccaggtacctcccccacaaacataggtctcctgccctgtcagctttccggtttccagtccagccgccagcgtaaatggcttcgctgtggaacctggctcaaatgcatcgctgacacagaagtttctccagagagtattcattgcctctattttatctttttctgacatttttgccagcgcttccggtgtataccaggatgtcagatcccgcggattgttcagatcaaaattaggataagatgcctccgccaagatttctccactgttgggatccatcataataaccgctgtattcttacttcccggctcgtcttcccgctcttcccctttgtgagcttcattaaattccaaaatatgcttttctacaatgctttgcaatgtcacatcaatggttgatacaacagtatttccatttttggccgctttgacagttcgctcaacggaagaagtactgtcataatacccatactctcttccatctgtaccattgagaatctcattgtaagcactctcaattccgattgccccctgatttccagatacagaaaatccgatcacatcactggccagactattatagggatatgttcgattataatcatcctccaaccagattcctcgaatttttgaagatttcttttcgtcctcctcaattgcacggaacgattttgcttcttcataagaaacgcccttttttaaaatctcatagcggctttctggattcgctttgatcgtatcccgcacggtttcactgtctatatcaaagcactcttccagcgcatctagtgtaggatcaatgtatttctcactgtttccttcgtctgtaataaccatgacatccagaatcacattatatacgcgctcactggttgccatttttgtcccgtttcggtctacaatgtcccctcgtttatacggaatcgtcctgttgccatactgctgctgattcaacacgatccttgtgtattttccacctttaaatacattgatatatgtaattcttccaataagaacaacaaaagccagtataattgccacgaacagcattaccagctttttttgcattctctttggaaacttttttgttaaaaattgatatggatttttttttcgtcttctcgtcattacatcttcctattttgaaacgcccttcgactttgcaagaattccatccgacggtatttcattatactgctttacataatcactggtcgggctttcatactctaccacattaccatctgccgcatataccattccaagttcattcattgctttgtcacgaatctcctgcagattcacagaatccgccactgcattataggccgtatcattcgcctctgtcaaatctgccagttcctcctgcagcgctgtaatattttcagatctctgtacaagctctgactggagctgcagatatacgacacagataacaactgcacagattgctgctatggttaaaaatcctgtataaatgggactcatatccagtgcccgtctgcgattttttttcacctgactgcttgtccgttttccgggacgtacttctactgcttgtttctcttgatccggcaataccttcggctgatgtgctacattcccatagacgtaaaactgtccatatctgttttctgtattagattgtcttctgtatgtagttctctttcctgcagccatttggtctgcccctttccacgtgcaatctgccgggttctccccttcccggcagattttatttttcagatactcaccctcatttttcagcttcgttcaaaaatacgaagtttggcactctttgaacggctgttatacatcaactcttcctccgagggaagaattggttttcttgtgaccactttcccttttgatatgtttccacatacacaaaccggaaagtgactcggacaggtacacggattttcattttttcggaatgcactttttacgatccggtcttccagagaatgaaatgtgatgatacaaatccttcctcccggattcagcatatcaatcatatcgtccagagtctcccgaaggacatccagttcccgattcaattcaattcggattgcctgaaatgttctttttgaaggatgacctgatgtcttctgaaacttcatcggaattgctcttctgatgatctcattcagctgtcctgtcgtctcaattggatgctttccgcgctctatcacgatgtgttttgcaatattttttgcaaatttgtcttctccataatcacgaatgacacggtaaagttccgcttcactatagtcattgacaatatctttcgcagtcatagtctgtctttgatccatacgcatatcaagcggcgcatctgtgcgataagaaaatccacgttccgctgtatccaactgataagaagatacacccagatcaatcacaatcccatcaactttgtcaattcctatttcatggagcctcggcttcatatcacaataattgctccggattattgttactttctccccgaaaccggctaatctggcgcctgctgcttcaattgcatcagcgtcctggtctattcctataaatctccccttgtcacctaaacggcttacaacttcaaatgcatgtcctccgccgccaagtgtcgcgtctacatagatgccatccggcttcaccttcaaaccatctactgtctcttctagtaaaactgatgtgtgtttaaatgccatagaatcctccacttattctttgttccgaattaaattcgaataccgattgcttccatacgttctgcaattgcatccaaatcctcttcactgactatgctgcgttcttcccaaagtgccttatcccagatctccacgcgatcctgaactcccaccaggacaacgtccttctccagatgtgcagcttttcgaagtgatgctggtacagaaactctcccctgcttatcaaaactgccctccgaagcacttccaaaaaaataacgcttgaaaattctggcatccttgttcatccgtggtaaggtatttaattcagcaacaaatttattccattcatctcgagagtacacaaaaagacacccttccaagccattacagatcacaaaactatctcctaagtcatctcgcaatttagctggaatgatgagtcggcctttttcatcaatactatgattaaactctcctaataacatctggaatcccttctaaaagcaggtcaccactttcgtcccactttatgccactattcaccacttcctaccacttgaaaccattgtaaaccaccaagctccctttttcaacccttttttcacatttttcacatccatgtcacaattctgtaaaaatttggttaaaaaaaagaacaggtcttttccacctgttctaaattccttcttttgcaactattcactaagtcctctcagataattgtttaccgcatcataatttacttctgccactgcccgctcctgctttgcctcataagatacatatgcagaatatccaagccatcccaccagcgccaatgccgctaatgaaagtacacactttcttacaacattcataatacgctgttttttcatatttttctttcgatttgccttttctgttttatatcgatctacttttgcctgactcatgtttaaaagctccttttgtcttctatgtatttgacagtttcctgtccccgcattctttctacatagtgtaacacattcacctctaaactacaacaataattcctccgtcattcgcataaaccgtactgattccagacgtatctacaatgaaactggatttcaccgcaaaccgttctgccaaaatccgctgcacttcttttgctcgctcttcacaattgcagtgtgcaattgcaagaatcttatcacttgcattcatcacatcggctgcaacacagtctgccatctttacgagtgcttttttcatgcctcgtgctttgtccttctggcagatcgtcccctgaggagtggaccccataaccggtttgatgttcaacgctccagctaccaaggatttgattcccgtcaaccgtccattttttcttaacgtatccagattttccagtacaaaatatgtgtgctgttcctcaatataattctccacgctttccacaacttcttcaaaagtcatccctgcttcttcacactgctgaattttcagtgcgatcaaagtttctcctacggaagcggatcgtgaattgaatatataaatctgtttttctccatattcttcttcgtaaagatttttaccaagaactgcactgttataagatccgctcagctcagctgacaaggtcaccacataaatatgttctgcatcacaatgataactttccatatatttttcaggagacggacaagatgtctttgcacaggatgcgctatctgcaatcgcctgcagcaattctccctgcatcaaactgtcgtcatccgtccagtgcatctcttctatctgaataccgagagaaacatgcgcaaatcttccatccgctctcatctccggcgtaaattctccacaactgtcaacaattactttatagctcatgtctttcctcccaaaccacactttccttttccgttttctattatatgtggttttcaatactacgttacttaatatatcacactttatgtaggatgaaaagacatttttaaatcttttatgcgatttactctgtttgcagtttaattctgctggatacactcagcgcaagtcccatttcaatcatcaaaaagagtaccgaagttcccccataactgacaaatggaagtgtaactcctgttgtcggaatcatattcgtcacaaccataatgtttaaaatcacctgaagtgcaatatgggcaaaaataccggttacgatcagtgatccatacagatcgggtgcatttttcgcaataaacatcagtctgtataaaagaagtccgaataaaatcagtactacaattgcaccaaacacacccaattcctcgcagataacacttaaaatcatatcattttgcgcttccggaatcatccctaatttctgtgtgctgtttcctaatccttttccaaaaaatcctccagatccaattgcatatagcccctgaagtacctgaaatccagttccgtcagaatgaccttccggatccagccaggttgtgattcttccaatcctgaaattatcgctgttcttggcatacactgcaagaatcgctacgactacaatcaaaatccctgctccgattgcagcaatcatcaaaaatggttttgtcttggggtgcgatacaaagatcaaaacacatgtgattgccattacaatgacagcagtactcaaattgtcggtaagaataaatactccaccggccgccacacccccataaatcaaaagccttcggattccaatccaatcattgacccgccttcccatcttacagatttcacaggaaataaacaaaataattgcaattttggtaatctctgcaggctgcagtgtcatatttccaggaagctgaatccatcgtcttgctccattgatcgttgttccaagcggcgtctgcacaagtgccatcatgatcatagcaaacacataaatctcaaaagaaaatgcgccataaatatgataatcaatcttggaaactatcagcataatgccaaaactgcctgcactgatcattgcctgtttcataaaataggacatatcattctgaaaatccgcctgtgcgctgtatgcactggcactataaagcataatgagcccaaagcacgtcaaaaatataataacaagcatcaaattataatcaaaatatgaagtagttgtacttgttttggcttcttttcttttctcttgccgcgatccggaagaatgcctcacccttgttttcccctgttcttttctgcgaatcggctgtaccgttttgctgctcataaaatctcccctgtttttattttgcccggtttatcttgcactcattgcaggatgtacaggttttccatgttcgaaaaatctgtcataccatacaaggaaaatatagaccgtccatatcttcctgctgttatccgtcttttcgttttcatgttttgcatgtttatgttcatccagcattttcacaagaagttccgtgtcaaaaaactttttagctgcatctgaaagaaacatctctttgacccgattatagtattcgtcttctttgagccacacacgaatcggtatcgggaagcccagttttttcttttctgccgttttactgcgaatcactttttctgctgccccacgaagtgcaaccttggtctttggcgctctcactttatactccaacggcagagtcagagccagctccagcacttttttgtccagaaacggaacgcgtacttccagtgagtttgccattcccatcttatcgcccttcattaaaatatcatgtaccaaccataaatgcatgtctacatactgcatctttgtcactgtatctttgtcctttacccgttcatacagcggtgcagtcactttctgtattcccggctgacatccttttttcagaatacggtttgcttctctctctgtaaaaatattcgttgcattggcaaaataccgctcttccaacgtcttcccatgacgcatcagaaatcctcttcctttcatgcctcttggaagacagcgctctgcaaacttcccaagcatgcgcctgatcggcatcggaatcttattaaatgaagtatgctccaatggttcacaataaatattatatccgccgaacaattcatccgatccctctcccgaaagcacaactttcactttcttagctgcttcctgactcagaaaataaagtgcgattgctgcaggatctgctactggttcatccatataatactgaatatcagacagcttatcccagtattcctgtggacggatcacttttgcatcatttttcatatggatacttgccgcaaactcctttgcatcctgaatttcactgtatttcccctcatcaaatccaacagtaaacgtatgatccacctgtcccagatatgtcagataactggaatctaccccgctggacagataagatgcaacctctacatcactgatcttgtgcatatccacagattctttcatcacgttttcaatgtcatctacaatttcttcaaaagatttcgtcgtatctcctgtaaagtcaggttcgaaataccgtttgatcgtcatttccccattttcgtatgtgaaatagtgtcctggctgtacacagaatacacccttaaaaaaagtctcattggttgggacaaactggaaagaaagataatttcccaaagcatcttcattgaagactttatcaaactttggatgttccaaaaatgatttgatctcagatccaaacatcagcgttccgttcatctgtgcataataaagcggcttaattccaaaaatgtctctggccgcaaacaaacgcttttcctttctgtcccagattgcaaatgcatacattccacgcaggcggtataccaattcttctccccactgttcatatccatgaatcaaagtttctgaatctgtattcgaaacgaatgtatgtcctttccgaatcaattcttctcttaattcctggtaattataaatctcgccattgaacacaagaaccttgctcctatcctcattgtataagggctgatctccgttctctgaaagatcaatgatcgaaagccgccgaaaacctaaagctgcatcttcatccaaaaatttgccggaactatccggtccccgatgaatgatcgtatccatcatattctccagtacctgctctctgttttcaactgctcccacaaaacctgcaaatccacacatatactgtatctcctcttaaaacttatgtaacctgtccttaacattccctgtttccaggcaggttatgtagactttttcagatccggatactcttattccggcaacaacgccttttaatatatcatatgcatccttcatttccaagaaaaaccttactttttcggttttttcattccaaacgaagttgccttgcgccgttcttcccacaactgatgcctcgcttttgcaagctgctcttccagatcttttatcttttcgcaataatagttcttttcttcttgttcggaaagaatatcgaaccgatactctacctccagccatgcaggtcctccgtccaactccggaatgtccataagatattgtggatcatccgttaaaaacaggctgtttccgcgatccgtggaaactgcattcactggcttcatctcatgttcaaccgaccttccattgatctttacactgctgatctcacaacggcacgctgcattgcatgggtcaaaccgtatcatcttcgcattttccaaaagccaggatttttgaattttataccctgacatactcggccatgtctcgctgtcctgctcgcagaaaccatttccgatatcataataacacttagattcctgacactcacttccgctgataaatccggaaacaatatcgctgtagaatttcattcgctcagcctctactccggaataatatgttctgcattctgtcagttccggtgatgccattaactcatcatacatttcgtcaaatcgttctgaatactgatagtctacggctgcgattttctgccaaagcggcagccattctcctgccggatcgtatccttcccgaatttcctcaaacagttcatcggatgtctttttctgaaatcctcttccagagaaattatttctctctgcaaggttaaaatttgattctgtcaaataccccggacctcccagataatcatagacgtaaaccggaacccccattgccagacatcttggcacagttcttccaattgtgatgaccaggtcatactgctgtaaaaactctgcatttacctgctccgttcgatatccaagtccgatcagatctacctgatagtatccgctcatctttttcttaagttccaaaagctcttctggaatgtgattggaaatgattgcaattttatccaattctcttttatatcctgcatactccctgcttgcttcaaaatattcggtctctacacaattctggaacacgcggatctgagtttctttcggaacctgcatcgctaccatatctgcacactcaggactgacacacaatacaaaagccgcctccggcgtacagacaggaagattttccattgcattgatcacactcagcttcgatacaaccattcgtttgtacttcaactcgtacctgcttgtaagataatcaaacaccggaaaatgttgaataaaaacaatctcaaactccatctccgtaagtgcctctttctgacattcaattactgtaattccctcttccagttcctgcagcagaggataagactttttataaacagcaatcactacatcatatcctttttctttgaacaaatgtgcaaactccagcacatgtagctcagaacctgtaaatttctgaaaataaaggttggtaataagtacttttttcctttgttccatcttgcttctccctgtctccccttttttcctcttctacagattatagcagaagccgaaatatttctccacccgataattgctttttccaaaaccaaacaaaaaaagacactgtcaaagtgtcccatttctgatcaatcggggtgacaggattcgaacctgcgacctcacggcccccagccgtgcactctaaccaaactgagccacaccccgttgtgcaactactgtttttcattatacaaaacttcttttaaaaagtaaatgccctctccaaaaataattaactttccgtttcgcctgtgctatttataaaataaaaaggcggaaaccatgaaaatcacagctttgacagtatcacaggcagagtacgcttcgctctgcctgttacatttatgaccgcttacatccacaattttgatttttatcaaattccggattaaatgcatagaagtttttactgtccagatgttcttgaacaatacgaagattttcaccgaatctctgataatgcacaatttcccgctgacgcaggaaacgaattggatcgcaaacttcaggatcttttacaagtctgagaatattgtcgtaagtcgtacgggctttttgttctgctgccaggtcttcatgcaagtctgtaatcggatctccttttgattgaaaataagttgccgtccacggtgccccgcttgctgcctgcggccaaagagccaaagtatggtccacatagtatggtgcaaatcctgatttttcaatttcttccggagaaagatttttcgtcaattgatatacaattgcacagatcatctccatgtgggcaagttcttccgttccgatatccgtcaaagttgccgtcacttctttataaggcatcgtatatcgctgagacagatacctcatggatgcagccaactccccatccgggccgccaaactgtgaaatgatcactttggcaattttcggatttgtctgtgtaattttcactggatattgcagtcgtttttcatagttccacataatcagcacccaccttcctgccatggccatggctcatcaacccatttccagtattcactgcaagacgcagcggctgtatcgattgtcagaggagtataatgcaatgcatattctttcattgcttcatttcgcatcctgctgtatttttcaaaataagcaagtgcatccggatcttgtggatgcgtatccagatacaatttcacctcatcgactgcaaaactaacagcattgatatgattgaacagttctgctctgcatggacactctgtcattgattgcatcctccttttccatagaatggtttgtttaaaacagggaagatcgttccacattccaatcccttgtgaacctcataagtgtcctcccatttttgccatggaacatatgccattgcaagcgtcatatgttccaacggatcacgggggatacggcaggaacaaggggctgaaacatgctcatcgcaagatggggatactttctgtcggtgctgcattggcatattccggcaaggctgttgctggcaggtaaaacgttcatttctggaataagttcgattattttgcatcatgtgttctttcctttcatataattacaatacataatatggaaaatctgcaaaaaggtgaattttgatgacaaatccgtttctttcctgtacaataattctgataaatgaaatacgagcaaaaaggagctatgtcatgagtattttaaatgtagaacacctgacgcatggatttggagatcgtgcaatctttgcagatgtatcctttcgccttctcaaaggcgagcatatcggattggtaggtgcaaatggggaaggcaaatccacttttttaaatattgtcactggaaaattgatgccggatgaaggaaaaattgaatgggcaaaaaacgttcgtgtcggatatcttgatcagcacacggttttggaaaaaggcatgacaatccgggatgtattaaaatcagcattttcttatttatttgaactggaagatcgaatgaatacaatctgtgattcactgggggaagccaatccagatgaaatggatgccatgatggaggaactgggaaccattcaggatacccttacgctccatgatttttatatcattgatgccaaagtggaggaagtcgcgaaagcactgggacttcttgatattggccttgaaagagatgtaacagatttaagcggtggacaacgtacaaaagttcttctggcgaaactactcttggaaaaaccagacattttgcttttggacgagccaaccaactatttggatgaggaacacattgcctggctaaaacgttacctgattgattatgaaaatgcatttattctaatttcccatgacattccgttcttaaatgatgtcatcaacattatttatcacatggaaaatcaggaactgaaccgttatgtaggagattaccatcatttcgaagaagtgtatgctgtcaaaaaagcacaattagaagctgcttacagaagacagcagcaggaaatcagtgaactaaaagactttgtagcaagaaacaaagcgcgtgtctctacaagaaatatggcaatgtccagacaaaagaaactggataagatggatgtaatcgaacttgccgcggagcgtccgaagccggaattcaaattcagatacggaagaactcccggcagatacatttttgaaacaaaagatcttgtaatcggatacgatgagcccctgtcaaagcctttgactctttccatggaaagagggcagaaaattgcgttagtcggcgccaatggaattggaaagacaacattactcaaaagtattcttggtctgattccggcaatttccgggacttgtgaacttggtgagaacttacagattggttattttgagcaggaagtaaaaggcgataaccggacaacctgtattgaagaaatctggcaggaatttccttctttcacacagtatgaagtacgatctgctctggcaaaatgtggacttacaacaaagcacatcgaaagtcaggttcgagtattaagtggaggggaacaggcaaaagtaagactttgtaaactcgtaaaccgggacacaaacatcctgcttttggatgagccgaccaatcatctggatgtggatgcaaaagattccttaaaaaaggcgctgcttgattatcgtggaagtgtacttttgatctgtcatgaaccagagttttatcaggatgtcgtacacgcagtatgggattgcagcaagtggacaacgaaacagatttaaaacttctccctgttagtctaaagaagccttgtataaaaactgccagtaggttcaacccactggcagaaaatttattttttcaactatctgcttgatatggagtagtccaatctgctacgcacccattccgataaacacaccaagtatataaggaatcagccagatcaaccatactacaatgctaaatttgtgaaaattttgcatctttttttgattctgtcccttaaagacaacggtcgcccatattgcatgaaacagcatgagaataattgccaatgcccccgtaattccatgaggactgaaaaggctgccgccttctgccatggaagacataatggttgtacccaccgtatcaaaaacgagtcccatccagaaaataatcagatgtggtttcttcaaaataccgctttttcgctctgaaaatacaccgattgtataaaatatcagtgccaatgtaattgtgacaattgccataattaattttgtgctcattttttcgcctccttaatttgaacattgttcattatattgttcatcccactttttgtcaatattttttatatttttaattgactccatttttcaaaagacttataatgaacgtagttcaactacaaaaagcataaggagttttatggtatgaatacaaacaaatcactgcataacaaaattcttgctgccagcaaagaaatcgcgtctgacaaaggatttcgcgcgattaatattcgagctgtcgcttctaaagcaggaatttctattggctctgtatacaattactttccagacaaatcagctttattacaagccaccatttccgatatctggtgtgatgtttttcaccgtacaggacaatgtactgctttaagttcctttcatgattgtttactttggctgatcgtttccatcgataaatgcagctgccagtatcccgacctcttttcttcccatgccgcctgttttcaagaaacagacaacctgcaagaaagccgtgaaaagatgcaaaaatatctggaacacattcataatgaaatgaaactgattctgcaaaaagacaaaaaaataaaggccggtatcttctctgagacttttacggaagatgcttttattgactttgtattttcgaatattatttccggattaagcgtaagagacaaatcctgctctttcctactaaaactcacagataaattactatatgactaagattgttttgaagcttcttttatcctttttaacttacggcatcctcgtttcatcacaatcttataataataacttttgaaactcctcatgtggatgctccgtgtctttctgaaagatatccacacaattcattgcggctcctccttcaaaaaaagcaggaaacaaaaatccacactctggctctcctaattcataatccccaacaagaggcgcaatcacgccgatcaaatattcaaacatctgctcagattctcccaaacgagccttgtcacctgcttttgcaggaatgtcatatcgatcatgaaatagatacacagcgtaatcctgctctgtctgatacacctctgtcaccttctcataaaatacatccagcagtgcatcatttttcaagccacagtccctgattcccatcagcaactgcctcatactttcctgtgcagattccggaaatacatagcgtttcagattctgattggtctttgcgaatggaatggtttttgcaatttccagatttttcccgcgttctgccggagacaatttcaggaaattcacattaaatgttccatcaataaacccatccttgtctgcatagcatcctgcaattcttgtcatggatgttctttttactgtcatacgccttgtcaaagaaagcatctcttcccgattgatgttcatttttttccacctcgttccatttcgctaacaatcttctccatcactttcagacacaaatctgctgctccctcgactgtctcctgaaaatcttcaacactatcttccactccgtcactgatacattttaccaacatgcacggcacctgatttcgattacaggtaagtacgattcccgcagcctccatttcacagatatctgcatcaaacatctcatgcatctttcttttctgtttgggatctgcaataaatttgtctcccgaagcacagactacggatactaattccggatggatattccttgccttatccaacagactctccgttgtcggaataaaaatatctgaatactgtgaataccgtcccacttccatatgatttgcggcactggtatcgaaatcataatgaacaaccgtctccacaatgcaaaccgtcattttagacatttcttttgtaagaccacctactacgccaaaattgatcaccagatccacatgatattcgctgatcaaaaactgcgttcccgatgctgctgcaatttctcccactccacatttcacaacaatcatccgatattgatccgtctcatattccagaacctgataccccgctgtctcttttttctcgaccagttttgctccataccgtttcaatacagactgtatctcaactgcaacgatcattccaattattttcattctttttctccttataagcatactcaaggtttataccaatacgagtgaaattgatacaaatacgtcctagctcccttcggcatctgtgtcacggcattgtaaacattataataatctcccgcacccatacttgctgaaaggattccaaatacaagtccaaacacaaactgaggatgaatcattccaacaatataaggcaagattccaaaaacaatattgggaagcatggacataaaaataaatctccctttactcatagtctccggtccaactacaaacaacatcccctgcttccagtttgtatataagtatacatcttctttgaagcataccgcatgcagaatttcatggggaaataacactacaaacgaaaacaccattccccaccacatttgcagggatccatcaaaaacaaagccgcccattctcaacgacgcaaaaattcccatactaaccagtacaagcaccgatatcacagttgctgttttagaaagttcttttgtgtcctccgcttctttaaatcttactgctcccggaatgtgttccttatgcggaatcgattccggattcaaatcgtatgctcctttgtaatgtaatctcatcttctgtatcctcaacctttctttcatcactataacaattctcttaccttctcaagaaatgcctcttctccccatgtattgattttaaaaaacattgcctgactgcctcctgaagtaattgctgataattggatcggaccacttccattctggaaaagcgtcacacttagacttactcgattatctcctgcataactataacgctcaaagacacgcacgctacatctggcagtaccgctttcaaaatcactgaactcttccaaagaagccgacatactgccttctacaattccctgttcaatcttaccaagtatttcataaaattcaccatttattgtctgttctaattttgccatcttacttcctcctgaatcgatacatatcacatcatttacagcactgccaataatctataacaaattctccatatttcaattctttcggaacaaaatcatcatggataatttgcctttatgcggattgtttttatagcatacgtatgttgccaaatactccctgtcactcacttccagcatattggtaaaaaaatctggtgcatccaatacaatcctctgttcctcatccccttctccattcacaactgtgatcgtctgttcctgcggattgatattttcaacggtcacaatcttcgtagctttttttcggatcagttgcttaaccatcttaaaaatccagatacctgttgcagccaggcaagcaagaggaatcagtatacttatctcatgaattccatagcttaccacggaataaattccgtaaaaagcgaattcttcttgcatgagaaagaaccaccaggctgtcactcccacaagtattcccaccattctctttgtacattgattcatattcgtgctttcctttcttctaatcggttcattgcttttgtcctacataaattcatttgtttattttatttagaatatcatatcctgtcacattttacatctatttataaaaaagtaacgcagatcctgttttcattttctacgtcacgtttcataaatctgcccttatggactatctcttttcataatcaatcatagtcttcaaaatcatttctacatctgtttacaataaatttctatcgcttttgcaacaaatataagcataaggttcttccatgcttgcttttgagtttctgccgactgtttaccagatttttcttcgtactcctgagcgggcggcagaagtcctaaggacactataaactattacgctgcgtaggagtcaatacttttttcaaagttgtcttcttttactatttcaaaagattagacagttaatcatttttctttgccataatgcagtaccagtcaatcaattcaaactctagcattttgaaatttgatggaaaacaataaactgagatctccgtataccccatcctctttaatttacttataaatagttctttcttcatcggataatatttttctttaaacacttctttccgatatatatgattctctttttcaaatgtatataaaagattgaaagtgatcgtatcttcagaatcataatcccaaacttgaactaaattaactctatcctcttttacgaaaaacggattgtatacataaaatctatttttctcatttaaaattttttcccaatttctagtatccagatacaaatacccacctttttttaccaaagaattcatttgttctaaagctgtaaacacatccttgttatttacatgtggtaatgaatttccggtactggcaacgcaatcaaattgtttgccattccaacaagaaagatttctaaaatcacagcgttttaattcaacatcatatctcgcagcagaagcttttagtttacacttttttatcatttcttcactcaaatcagaacctgctagctgaatccccaactcacatagcggtaatgttacacttcccgatccaatactaacatctaaaaaagattgaatattcttcccttgcagtattgtttgccaatgttttttataagaatttaaatgtattttgtcctctaacatatcataaatatctgctctatcatatatacttgacatctgactcctccactatcataaaacaaaaccgattactgcgcgatgacctcactgcatttctctcaactttttagaaactatcaaattacaaagaaatgctactgcgacaataataaagcaaatgattgtacaccatacaggtactctcatatctagttgcactcgcagcaaaatcgtgattgctaaaaatacagctcccacaatttgtataaaatctaatatctttttttgaagtgtctgtaaatgctttttctcttttattctttcagatttccatattccataatttacttgcatatcatttacatcttcatctgatataagttcgtccatacttacatctagttctaatgccagtttttttgccgtaatcaaatccggacatcttgaaccattttcccaacgacaaactgtctgccttgaaacatataacttatctgcaagttgttgctgagtgagatttttttcttctctgaattttttgatgttatcatttaatgccatactccatacctcgctttcattcacatcatataacgatagaacccaaaataaaagtaccagtatgtatttcctttgtttccattttggtaacatctgtttattctaagttttctacaccataataccgatatatcgctgaaccaatgtattttgtaaccccttttccgtactgtttatctgtgtcttcttccaactgagaataattcaaataatctttcgccatttctagtaataatactcttgcattatccattttaaaaagatttttacaacttttccccaatctttttactgctttcattgacatatcttcatctgaactttccattgcacaagcaaactgtttataaatcaattccatctcatttttttgctctgtaacttcttctctagttcctgttgacttcagacttgcttctactgctttttctttactttcatatatcttaattaaatgctcacatgccttttcatctttaaagccttccgcaacagattctttaaacttctcaatatctccataatgctcgataattattttcttgtcttcttcactcataatttttaaagaatgttgtattattttttgaatatcatctttattaaatgtttcaaaactcatcttgtcctctcctttcaacacatcagaaatcaattcgataataccattcaaacgattccgtttcatttctagcatcattttctgtgtttcaagaatcttacgattatcactttcagaattcttcataattgcttttatttctgacaatggaacttccagttctcgaaaaaacataatctgacgtaattttttcaatgagctttcatcatataaacggtatcctgcttctgttactttagcaggttttaacaaatcaatttcatcataatatcgtaatgttcttatgctaattccagtcaattctgatacttctttaactgttttcataagtcctcctttccctttcatcgtaaaccgttacgttactagagagtcaagatgttttttctattttatcacaaattcaataaaaccgcccttaattttacaaatgagaaatgacgcaaataatgtttccactacctacgccatttctcattacatctttgaaatatttactccattttctttcaatctttactccaaatttactccattttaaaaatctgttacgatattttgcggtattctgcgatacctttcccttgaagaaaaatgtctataaatcttgatttcaagcgaacttttcaatatttccaagcactttattctgttgtgagaatatcttctcaattatttcattacaatattaatgattttctttggaacatagatttctttcatcacatttcctgtcagtttatctgcaatcgcttcttttcctgctgcgatcgcatcttctttggagatatctgctgcgatactgatcacggcttttgtctttccgttgatctgtaccggaacttcgatctcatcatctttcatctgtgcctcgtcaaatgtcggccatcctgccttgaagatggtctctgtatgaccaagctgctcccacatctcctctgcaaagtgaggtgcaaacggagaaagcaggactgcgatcgtctccagagtttcttgatcgattccgccttctttctttgcgatctcgataaatttgttattatactccataaatccggaaataacagtattcaagctgaaactctccaaacgtgttgtaatgtctgctaccattctgtggcgctgtttgatcatctcttttgtcgcctgtacgtcatgctctttgctgtccatcagcagattccacagacgtttcaggaaacggttcactccgtcaattccacggtcatcccactccgcatccagctctggcggacctacaaacaattcatacattctcagagagtcgcatccataatcgcgcaccagatcatccggagatacaacatttcccttggatttactcatcttgattccgttctttcctgtgatcattccctgattgaacagcttatggaatggttcatcaaagtctacaactccgatgtcatgcaggaattttgtatagaagcgggagtacagaagatgcagcaccgcatgctctacaccaccgatgtacatatctactggaagcatctcgtccgctttttcccgggaaaccagttctttgtcattgtggctgtccacataacgcaggaagtaccaggaagatcccgcccactgcggcatggtatttgtctcacgttttgcatcttttccgcaaaccgggcacttacagtttacccactcttcaattcctgcaagtggagattctcctgttcccgttggttcataagactctacatccggcagtcgaagcggaagttcttcttccggtaccggtactgctccacaatccgggcagtgcacgatcgggattggttctccccagtaacgctgacgggagaaaacccagtcacgcagcttatagtttacagttgcttttccgattccacgctcttcaatgatgtgcggcgcttctttcttaagaacggctgattccattccattccactctccggaattgatcatagttccaacagcatctgtatatgcttcttccatgttttcgatttcctgtccatcttttgcaatggcctgaatgatcgggatctcgaatttttttgcaaatgcaaagtcacggtcatcatgtgctggtacacacatgattgctcctgttccataatctgccagtacataatccgacagccagatcggtacttttgcaccattgatcggattgatcgcatagcttcctgtaaagactccggttttttctttgtcctgcatacgatctacattggatttcatggaagcatcgtaaatgtactgctccactgcagctcttgtctcatctgttgccagttcttttgcaagcgcatgttccggagcaagtaccataaatgttgcaccgtgtaatgtatccgggcgtgttgtataaacagtgatcttatcttctcttccgtctacctggaaatctacttctgcaccataagattttccgatccagtcagcctgcattttctttactttttccggccagtccagtttatccagatcatttaagagacggtctgcatattttgtaatacgcagcatccactgacgcagatttttctttgtcacttctgttccgcagcgctcacattttccattgacaacctcttcattggccaaacctgttttacaagacggacaccagttgatcgggaactctttctcatatgccagtccctctttgaacatttttacaaaaatccactgtgtccacttatagaaattcggatctgttgtattaacttccatatcccagtcatataatgctgcaatctcattgatctgacgcttgatgtttgctacattctctgctgtggattttgccggatgaacccccatcttgatcgcataattctctgccggaagtccaaatgcatcccatcccattggatgtacaatgtaatatccctgctgtaacttataacggctccatacatcagaaatcacatatcctctccaatgcccaacatgcagaccatttcctgacggatacgggaacatatccagacaataatatttttctttcttttctccgttgtccttgtatcttggatttaccggattttcctgccatttatcatgccattttttttcgattgctttgtggttataaaccatttttgcacccattttgcatatcctccttttatttcaaaaaaagccttctcatctcataagagacgaaaaggcttttatcttccgtggtaccactctttttcatctgcacacacacagatgcactcattgcttctgtaacgggaagacccgctttttcctacttttccgatccgggtgttcagaaaaagaactccgaggggagttgggagaacgctgtttcctgcctcacaccatccggcaggtctctgaaaaacctcagactcttactattcctcatcaacatttctttcatatgttttcttattataaaaagaatcataaaataagtcaagtagatttctttgattttccacttatttcattctgccaaaatagtcttttgtttctttcaccacaacgttgctaagcgctagcagtgcaatcaggtttggaagcgccatcaacgcattgaaaatatctgcaatgttccatactgctgcaacagtcatatacggtccgataaatactgccagaatgtacagccagcgatatgtcattacaactttcttgttccgattgaagagatactccatacaacgctccccataataattccatccaagaatcgtcgtaaatgcaaaaaataccagacagatcatcaatacaaaagatgcaattgccggtgggaatggcaagcctttctgaaatgccgccatggtgatctccaccccttccagattcggatcgttccaggttcctgccaaaacaacagaaattccggtcattgtacaaataacaatggtatcaataaatgttccggtcatagaaaccaatccctgacgcaccggttcttttgtcactgctgctgccgccgcgatcggtgcactaccaagacctgcctcgttcgaaaagattccccttgcgattcctttctgcattgccactatcattgttcccattgcaccacctgccagggcacttccggtaaacgcagatttcacgatcgttgcaagggctgccgggatttctgtaatgtgtgtgaccataatgatcaatacaaatacaacgtacagaactgccataaacggaactacaatttccgatacttttgcaattcgcttcaatccgccaatcacaacaagaccaacacaaacggtcaaaataatacatgtgatcacagttgcccaggaatatgtatttccgaacatctgcactgcattttcagtattcgggtcaaagaaattttttactgcagatgcaatactgttcacctgagtaaatgtaccaattccaaacaatccaactccggctccgaaaaatgcgaatatttttgccagccagcgccagttttttcccattccgttttcaatataataaaacggtccccccagaacatgtccatcctgatcaatggtacgatatttgattgcaagcaatccctctgcatacttggtcgccattccaaaaaaagccgctacaaccatccagaacaatgctcccggaccgcctgctgcaagcgcagtggcaactcctgtgatattgccggttccgatcgttgcggaaagcgccgtgcaaagtgctccaaaactggtcacttctccatggccgtcatcttcatttttcaccatgaatctgagtgctttcggcaggtgccgaatctgaagtccgccaaggcgaacggttaaatagatacctgttgtcagaatcaatataataagcggcagtccccagatacggtcatccacccatttgattgctgtgtcgatttgactgtagatttgtgctaacatactttctttcctccatccttttgcctgagagattctcagaaatcttgtatcaaatacacattctttctgattacaccttcggcgctctttttcagagactctcctgagtttagtgttttacaacactaaagcaaagaatatcatgcttttcccgagaatgcaagtagatttccatttttttcttttaaaaaaactaatcaatccttataagtaaaaagaggaagcacagtttttcctgtcttcctccttctttttaaccaagagccacatccagcaccatcatcagtgtgaatcctgcaccgacaccgattgtccccatattggtatgttttccgttctgtgcctccggaatcaattcttctaccactacataaatcattgcgcctgctgcaaacgacaaaaaataaggcaaaagcggttccacaagtcttgtcagccaaatcgtcagaaaggctgcgatcggttccacaattccagacaaagcgccataccaaaatgctcgggattttgtaatcccctgagacttcagcggcatagaaataatagccccttccggaaagttctgaattgcaattccaagggacaaggcaaatgctcctgccatcgtgatcaacatattacccgaaagagctcctgcaaaagttacccccacagccattccttccggaatgttgtgcagtgtcactgccagcatcaacatggttgttttccgaagcggcgtccggatcccttccggctttatcccccgaacatgctgatgcggtgtcacaatatccagcagcagcaaaaatcctatccccaaaataaatcctgcagctgccggaacccatgcgattgttttactatcctctgccatctcgattgccggaatcaaaagtgaccatacagacgcggcaatcatcacacccgaagcaaatccaagcagccccttctgcagtttttcgttcatctccttccgcataaaaaagaccattgctgctcccagagtcgttcctgcaaacggcagcagaataccaagtactacatccacatttaaattcatctgtctctccatttcatattttttatcgatatgttactttatgcccgggagaagattttggttccgcctctcagagattatgatacagctctggcgatcaattgctttccagctttgcggcattcctccaatgcagcatcatccggcgcttcatttgcaatcacaccttcttcacagatcagatttgctcctgcttctttcattctctgacaccaatcgcgcatccactctccatctccccagccatatgatccaaacaacaaaagctgttttccggaaatcatggattccagttcttctacaaatggttccatttcgctgtcttctaactgttctgctcccattgacgggcatccaagtgcaattctgtcatattgtgaaattgtacctgcatccgtttgtccgacttcgcaaatttctgctgctcctcctgccagccgaatcccctcggcaactgcctgcgccattgcctccgtatttcctgtcccactccaatatacaactgctgcatccatatcaattcctcctatattttactgtgcaatttcccggatactttttccggctaaaaattctctgaccaccccttctttggcctgatcataagacttgaaaatcatttttgccctggatggattactatatactttccaatatccgatcataagatacgcatttccatgattttgaataaatccctccacatcttctttcggatatcctaaaaatacaccgatttcatgtggaaaccctaaatttctttcatccagcatattcactctggcagccaacttctgcagcatctgatccaaactctgcttttctgtttgatatccatatgactgcagcagatattgattttcagtcaacatcaaatgttcttccaacacacttcttctaaaaaagaataccagacatcgtccttcccgaaccgataagatacggtattccacctctgtttcttgaaaaatctccttcaattccttacacatttcctgtcccatggtgatcacactggaaatcttaatcccttttaaaaagggagcacactgaagtgcaatctgaaatctcgtttttaactttatattttcgtttttcaaaaaataagacaatgtttctgatgacattttggcctcctataattgattatgattctcaattaacttgatattaccatctaattctgagcatttcaatgctatttattgataatatttctcattttaattttctgaatatttatttccatttttattatttttttattgtttggtcgacttgtttggtgtataataaatttaagttatttgagcagacagaagtctcaaaatacatacaaaaaggagagatttgccatggtaaatttaattacaggaccaaaaggaaccggaaaaacacaacagatgcttgaacttgcaaacgaaaaggtcaagacatcaaatggaaacgtcgtattcatcaaaaaaagtcatcgcaacaccactacattagacttcggtgtacgtgcaatctgcatggaagattatcctgatattctgacaatggacgaatttattggttttctctatggcatggtagccggcaatcatgacattgataccatttttattgacagcgtattaaaacaggcagatatttctttaaataatatttctgcatttatggctagtctgagtaaaatttctacagagaacaatcttgatttctttatcagtgtgggggctgaaaaagagtcaattcctgatatagattctgataactacaaagttttgaactaatgggtataaaaaagacggtattcagtattttctactgaataccgtctttttattctacttctaaagatgtctgttcttcattttgtgtttttgccttttttgcattctgagtcggctctgttccattcaaagaaagtaccgcatttgcccgctcatcttctttgtattcaatcgttaccgtatcaccgacattgtatttgataatatcgatgaattcgacaacagaaacatcaaaaatatcatccgaatcttccagcataatataaaagtgagaatctccatccacaactccctgtgcgatttttgtaatcttagaagttaacttcttcacttctcttgtatcttcctcttcttttttgataccattctcatacatcagttcattgtaattctcttcacattcactgacagtatctccaattgccacaacctgatatttctgcacattgaccatggcatactttttcacaagccccgcatcatccttgagcgccataaagtacgtcggctcaccggaaatatttaaaaggagcggaaatgccgccttatatttcaaattctgaacctggccttctgcagaagacattgccgactcttctgtggcaccttccacttcataaaatctagtctccattgtgcgctgattcatcagaacaaaccctacattagactgatctccggttattgatgttacccccgtatatacccacacgtcatcatccaatgccagataattataacctgtcgttgtatgcagacaatccttttgtcccaatacactgttcaaaaatccgtgcttcaatgttccgtaataatcatacaactgtaccaaaagatccgctgagtacgcacggtcaatccactcaggtgcatcttctatcttgtaatcctctgtctcacctgtgatcgcgttacacaataccactcttccgacagtcgtccccccaaacaaaccgatattaaacttcttcactggacagatccagtaaggaactccattatcatcaatctcaaaactcaaatcgttaaaaatatacgtcggatactgaaaacggagatgacgataaatgttacggttgaaatgatcacttgtagtatatttcattcctttctcaagttttaccagttccgtattctgagttgccatatcaattttaatataggcaggaattccctcactctgattcgtgaaccacttgatcagactggcataacgcaatggagatactctcaccggctgatcctgatagttgatctggctgtatctgtcatccacttcgaactgggataccatatccaccatgcttcccatctttctatttcccaaaatagtagcagaatctctgtccagaagtggaatctgatcaaatgacaactcttccacatcctttgtaaactctccattcttcacggtcatcagcttctgatactttttcgcattgacaatcggagaagataacagtgatcctgctgcgtatacgatcacaactgctccgagaagtcccaggatcactttcattcccttggactctctcaactcataacggtcaaatctctttcttttggcataaaacaatgctgctgccacaatcactacgatcaaaaatacccagaactccgtagaatgaatattgatcgccggaattgcagcataataataaatgcctgcaagaagaaccaacgccaacactgcaagaagtttcattttaccttttttcatgttctttccctttcctacaaataagttttacttttgagtaatgggacaattataacattttcaagaacaattcacaattcctattgtaatttttatatctttttaatatttgctctgaatttttcgacattttgtcttaaaattttcgtctccacaactccggtgcgatcaacacaagacacggaaaaatctccagacgtcccagcagcatatccgcacagaataccagttttgacaaccacgaaaactcaaaaaagttttccaccggaccaacctgtgaaattccaggacccacattattcaatgtagtcaaaaccgaactaaaagaggttgcaaaatcataattatccaaagacacgatcaaaatagaaagaatcaaaatgatcgcataacatatgcagtaaagatatactccgtgaagcgtctcttttccaaccttttgtccatttactgtcactactgtcacagccttaggatgcaggattcgtttgatctcctgtttcacacttttgcagagaatcaggattcgcgatactttcattccaccaccagtggatccggcacatgcaccaatgaccatgatcaccaggatcagcgtcttggaaaactctggccataaattataatccgctgtacagaatcctgttgttgtaatgattgatgccacctgaaaagaagaatatcgaaatgcttctgccacatttccatatatataatgaatattcgctgtgatcatcaccgtagtcgctgcaatcactcccagatatgtacgaacctcttcatttttccatgcactcttccagtttttcagatacatcgcaaaataaatattaaagttaattccaaacagaatcataaacaccgtgatcacaccatctatataggcgctgtcataataactgatacttgcatttctattggaaaatccgcctgttcctgcagtactgaaggaatgaatcaatgcatcatagagattcatcccgccaaacaaaagaaagatcacttctgccactgtcaggaccaaatacatcagatataaaattcttgctgtactgcgtgctttcggcacaagcttatccgcctcgggtccaggtacttcagcccgcatcagatacatcgatccatcatcatccagactcaaaagtaccataacaaataccagcacccccataccgcctacccagtgtgtgagcgctctccagaacaacattccctgcggaagagcttcaatatcagtcaaaatggtagaacctgttgtggtaaatccggaaaccgtttcaaaaaaagcattcagataattcggaatggatccagaaagaaaaaacggcaatgcgccaaataaagaccacaaaagccacgccattccaaccagtgcgagcccttcttttccatagatactcgtatcaccgggctttttcctgcctaccagcagaaaaactataaagagaagacctgctgtcagcaaaaatgcgattccactctgttctttgtacaggaaagaaacaaaagcaggcacaagaagaaggagtccttccactcccaacattctgcctatcatataaacaatcattctaatattcatctcattacctcttcaccaaaatatcttccagatcccggatctgtttcgtcatggtgataataactacactgtcacccacctgaatgcagtcatctccgtttggaataataatccttctatcccgcgctatgcaggcaatgatattgtttgctttcaatttcagatctttgagcgcaattcccgtataggcattgtcggattttacaataaactccagtgcctcaactcttccatccagcagctgatacatcgtttccacattggcactgctctgagaatttcttctcgcacgtacatagccaagaattgcatctgctgttgctgttttcgcagatacaatactgtccagaccaagctcatcgatcatcatagctctcctgtcttcattgatttttacgattactttcgaaacattctgttttgaagcaaacagcgccatgataatgttttcttcgtccattccggtcaatgcaataaatgcatccgtttttttaattccctcttctatcaaaagatcatgctctgtagcatctccattgataatcgttgtttttggaagcagttcacacaattcttcacatcgattgcgatctctttcaataatcttgacattcattccaagacttcccaactggcttgccagataataggcaactcgtccgccaccgcagatcattacatttttgattttctctcttctcaaagcgatctttttaaaaaactgctccatattctggtgagaagctgcaatatgtaatttatctccttcttttaagatgtaatctccatctggaatcaaaaccttttcatccgactctaccgcacagaccaacacctgaacctgaaaacgtgcgtataattctgataaagataatccttccagcttgccgcaatgaatcgggaattcaacaagttccactcttccttttacaaatgtctctactttacttgcgtctggaaacaataacagacgggtaatatctcctgcaacgatcaattccggatttacaaccatactcaaatgcagatcctttttcaggaaatcaatctgcttataataaatcggatttctcactcttgcaatggtatgacgtgctcccaatcgtcgtgcgatcagacaactgagcatattacactcatctgtagatgtacatgcgatcacgagatctgcatgtggcacatcagctctttgctgtacctccacgctgccgccttctcccgcaacacaaaaaacatccatcttttcaatggatttgcgtagtttctcttcattattatcgatcagaattacatcgtatttttctgcggacaactgtctggccagtttgtagccgaccttaccgtctcctatgattacaatcttcatctgtcccctaagtcctctctcttcttacatttgatttctaaaacgtattttattatatcattttaacaccgcaggaacaatcttaatatgatttttatataatttctacattttgtctcaatttttggcattttcttaaccaaaaggcatcatatagacaaaatcagcactcataaaaataagtgctgatttcgcccgatttttcctggttttatttttcttctgcagctcttgccgcaatttctttttcctgtacatccgatggcgcctgttcatatcttgtaaactggtactcataggtacctcttcctccggtcatagaacgaagaacggtacaatatccaaacaatcctgtcatcggaatgtctgcttctatgatctgttttccaccactgactggtgtcataccaagaacacgtcctcttctcttattcagatctcccatcacatcccctgtatagtcatccggcaccgttaccttcagagatgctattggctccagaagaaccggaccagcctccataaatcctttcttaaacgcctggatcgttgccgtcttaaatgccatttcagaagaatctaccggatgataagatccatcataaagaactgctttcactccaactaccggatatcctgccagcggccctttcaccactgaatcctgaagccctttttctactgcagggaagtaatttttagggacagcacctcccacaacttcttcttcaaacacataaggtgtctccagatcaccggatggttcaaagcgcatctttacatgaccatactgtccatgtcctccagattgttttttatattttgtatccacatcagatttcttgcggattgtctctcgaaatgccactttcggtgtctccagtttaatctcaactttatatctggctgcaagtttgctggctgcaatttccagatgctggtctcccataccatacagaagtgactgtctgttctcactgtcgttgaccgccttaagagttacatcctctgccatcatcttctgcaatgcctgagacaccttatcttcgtcgcctttggtcaatgtcttatatctcatatatgtataaggaacagaatagtctgttctggaataagaaattggcgtattttttgtggaaagcgtatcgccggtcttggtatttccaagtttcgcaatcgctccaatatcccctgcaaaaagttcggctacttctgtcggcttgttgccgcacatcgtatacagtttacctggtttttcctctgcatctgcatccgcattgtagagtacatcatcccctttgagcactcctgaacataccttgataaaggaatattttccgataaatggatctaccattgttttgaatacatacgcagactttgcctttgcaaaatcgtaattggcctcataaatctcgctcttggttctgtggataccggcacagcttcttttatccggacttgggaaaaaccgtacaatatccgaaagcagattggcaacaccctgtgcctgtatattcgatcccatagcaaccggaacgatatccccatccatcacttccgtacgcattgctgctcgaatttcttcgattgagaattcatctccctcaaaataacgatccataaattcttcactggtctctgcaactgcttccatcagagaatctctcaagattttcaagtttggaagacaatattccggaatctcacactcttctctctggccaattcccgtataacgtctgccggcatttttaataatattgatgtatccgaccagcttttcattctcacggatcggctggaaatgaggtgcgatctttttgccgtatctggctgtcagatcctccacaacctgacgaaaacttgcatcatccatatccatttctgtcacatagaccatacgtggaagattatacttatcacaaagctcccatgctttttctgtaccgacctgtacgccggcctttccggaaaccacgataactgcagcatctgccgcacttacagcttcttctacttcaccgacaaaatcaaaatatcccggagtatccagaatattgatctttgctttctcccattcgatcgggatcaaacttgtgctaatagaaaaaccacgcttctgctcttctttatcaaaatcacttgtcgtattggattccgaaatctttcccatacgattgactgctcctgatacataaagcatcgcctctgcaagacttgttttgccgctgccaccgtggccaagcaatactacgtttctaatctcatccgttctgtaaactttcatagtgctgcctccttatgttgttattctcttcatgttccggcagcttttctgccgactcacgtgctatgtgtatattgtactaaaatttcattcagattacaactattttatttatttttaacaacttgtttctgatttacttttacagtttaaaatgctaaaatatttcatatatgcttcttgggactgtacggatggcttgcagtttcccatcagccagtttattgagaaaggacataaaattatgcagacaaaatcaagcacctccattggatttatcggccttggattgatcggcggctccattgccaaagcaatccgccagtattatccggactatcagattctggcttttgatcaaaataaggagacacttgccctggcactgcaggatggaaccatcgacgtttcgtgcaccgccatcgatgaacagttttcacggtgttcttacatttttctctgtgcaccgatttcttataacaatacttatctggttcaattaaaagacctgatttctccggattgtatcctgacagatgttggcagcgtcaagaccgcaattcatgatgagatcatccggcttggtctggaatccaattttatcggcggacatcctatggccggttccgaaaaaagcggattttccaattccaaagcgcatctaattgaaaatgcgtattatattctgacgccatctgataaagtttcctcacaaaagctggaagactaccgtacctttgtggcatctttaaaagcgcttcctatcgtactcgattatcggctgcacgatacgatcaccggaacgatcagtcacttgcctcatatcatagctgcctgtctggtcaactttgtcaaaagcagtgataccaaagacgaactgatgaaacttcttgctgccggcggatttaaggatattaccaggattgcatcttcctctccgatcatgtggcagcagatctgcctgaaaaataagaataacatctcgcaaattctggacgcctacattgccgagctccagcacgccaaagtttccattgatacaggcagtgaacacgaactgttctcactttttgagacctccaaagattaccgggattccatgccggatcactccgcaggccctatcaagaagaattttgctctgtattgtgacatcattgacgaggcaggtggaatcgcgaccattgccaccattcttgccagcaacaatatcagtatcaaaaatatcgggatcattcataaccgggaatttgaagaaggggtactgcgcattgaattttatgaagaagctgcctctgtaaaagcagccgcacttcttcaaaaatacaggtatatcgtatatgaagtttaaagaaaggaactaacactatggaattgacaagtattacaggattaaaaggggaagtttctattcccggtgacaaatctatttctcaccgcagcgtgatgttcggctctattgcagatggtgtcactgagattcacaactttctcagcggtgcggactgtcttgccaccatcgattgttttcggaagatgggggttgagatcacagaacacaaagatcgaattctggtacatgggaaagggcttcacggacttgccgccccggcagaaaccctgcaggtaaaaaacagcggaactacaacacgtctgatttccggaattcttgcaggacaatctttctcttccacactttccggagacgattctttaaattcccgccctatgaagcggattatggaaccattgacacagatgggagctcatatttccagcctgcatgacaatgactgtgcccctttgcgaatcgagcctggaaagttacacggaattcattatacatctccgattgcttctgctcaggtcaaatcctgtcttcttctggcaggactttatgcagatggtgagacttctgtaacagaacccatcctgtcaagaaaccacaccgaactgatgctcaaagaatttggtgcagatatccggacagtccatcagctggccggttcacaagcaacagctgtcctccagccgtgccgggaattgtatggtcaaaaaatcacggttccgggagatatctcttctgctgcttattttattgcagcaggtcttttggttccggattctgaaattttagtaaaaaatgtcggcatcaaccctactcgtgcgggatttttgaaagtatgtgaagatatgggcggtgatatcaccttgctcaatgaacgcacagaagccggagaaaaaatggcagatatcctggtgcgaagcagccatttacacggaatttcgatccatggagaaattatcccaaccctgattgacgagattccgatcatcgctgttatggctgcctgtgcagaaggcaccaccattattcgtgatgctgcagaactccgggtaaaagaaaccgaccggattgagacagtgactgataatctgcttgctatggggtgcagtgttcttccgacagatgatggtatggtgatcaagggaggacagacattaaaaggcgccacaatccacactcttctggatcacagaattgctatggcattcagcattgcagcgcttgttgctgaaggacgcactaaaattttagacagtcattgtatcgatgtttcctatccgggattttatgatacctttgaacagcttctataaagagcttcttcttttggaaaccatattaacagggcaggtgcaactcacatgagtcacacctgccctgttaatatggtttcctttttaacgaatttccactaccgtataatccttatcttccactgcttttttgagtacctcatctgaaacttcttcgttcagtgtcacaattgctatgcctttttcgtggcttacatctgccgcttccacttctgcaagtgactccagcgcttttttcacagacgcctcacagtgtccacacatcattccttcaattttcattgttttttccattcttctttcctcctgtttcttctttgttcttatctttcggtctcttgtagcatcctgcatacggaaccagttgagacgaagcgcattggttacaacacaaaagctggacaaactcattgctgctgctccaaacattggatttagtttccatccaaacataggataccagactcccgctgccagcggaataccaattacattgtaaataaatgcccagaataagttttcatgaatattgagaagcgttgcccgactcaagcgaattgccgccggaacatctgtaagcctgctcttcatcaaaaccacatctgccgcatcaattgcaatatccgttcctgcaccgatcgcaattcccatatctgctcttgtcagcgccggagcatcattgattccatcgccaaccattgccactttaccttgttttttcagcctgcgaatcacttcttcttttccttccggcaatacccctgcaatgacttcatccacgcctgcctgtactccgatcgcacgggcagtctgttcattatcccctgtgagcataactacctggattcccatattctgcagttcctttaccgctcgcggactgtcttcttttatcacatctgccactgcgatcattccaaggaattcttcatcttttgcaaaaaataatggcgtttttccctgatccgccagattttttgcctcttcctccagacgctttgagacctcggcatactgtcggataaatttcagatttccaccagtaaatttctgacctttaaacattccggaaagtccatttcccggtaccgcctgaaattcactgatctcgatggcgtcggatagattctgttctttcacataatccaaaactgcttttgccaatggatgctcactcttcttttccaatgcatatgcgatctgaagaagcctttctcttcccgtctcgtgttctggtatcacatccgttacttttggttctcctctcgtgatcgttcccgtcttatccaatgccacgatctccacttttccagtctcctccagagagacagcagttttgaacatcacaccgttttttgcacctttcccacttcctaccatgatcgcaaccggcgtagcaagcccaagtgcacaaggacaactgatcacaagaacagaaattcctcttgcaagcgcaaatcccacactttctcctgccagcatccatatcagaaatgtaaaaactgcgattaggatcactgcgggaacaaaaatgccagataccttatctgccaccttggcgatgggcgcctttgttgcagctgcatcactgaccatctggatgatctgagacagtgttgtatcctctccgacacgcgacgcctcacaacggatatatcctgactgattcagcgttgcagcagacacaatatctcctgcctttttgtctacaggaatactctctcctgtcagtgcagattcatcaatcgcactgtttccttccagcacaattccatccacaggtatatgttccccgggccgaacgacaaacacatccccttttctaacttgttcaatggagaccgtttcctcctgtccttttcgaagcacaactgcagtctttggtgccaggcgcatcagccccttcagtgcatctgttgtctttcctttggaacgtgcttccagcatctttccaactgtgatcaatgtcaggatcatcgctgctgattcaaaataaaactcatgcatataggacatcacccctgacatatcctgacgcatctgtgcatctgtcattgcaaataatgcatacagactatatccaaacgaagccccggatccgagtgcaactaaagtatccatattcggtgccccgtgcagtaaactttgaatcccgctgacaaaaaatttctgattgacgatcatcacacagcctgtcaacaaaagctgcaaaattcccattgccacatgattctccgacaaaatctccggcaatggccaattccacatcatatgccccatcgaaagatacatcagaggaatcaaaaagcaaaatgataaaatcagccgttttttcagaatcggtgtctctttgtctttcaggaaatcatcttctgtaggtcctgcctgttttgctgtctgcccatcttttacggaggccacatatcctgcttgctcgactgctttgagaatctcttcctccttcacatctccttccacccccatcgaatttgtcaaaagactgacggaacatgatgtaactcccgaaactttggaaactgctttttccactcttgcgctgcatgccgcacagctcatcccttctacacgatactgtttcattgtaccacctccttttatctcatcagtttttgaagtgttgccaccaactcatcgatggtctcttctttcccctcccgaatatcctctgccacacaggttctgatatgattcccaaggagaattttattaaaactgttcaacgctgcattgactgctgaaacctgaatcagaatatctgtacagtacgcatcattttccaccatttttttgattccccgtacttgcccttcaatccggttcagacgatgaatcagatttttatattctttttctgttctttcttttttctttgcatgacaacagcattctttctgttcttccatatttcttacatcacctcatttcttacatgaagtatataccctattggggtatatttcaagtaaaaattatattttacataaatttacacacacgttgtaacacaaattaaccgggaagagaatctgctttcgattctctccccggtcataagattcatactctctatgtaattttccatcttttaaacacggaatttcttttgaatttcccgaatcagggattttccccgaaatactgcaatccctgccagcagcagaatgctgattcccgtacaaagcaatgacggataccggatctgaaccagatccagtgccagaaggattcccggaatgcatccaaaagcaccaatctgaaccaggtaaaataaatactcattctcctccagacggcatacctttgccaccacggacatacctgccaaaataaccagagatgccagaggcagtacaaaatcaattgcccatccatgccagccggtgatcgcatcccacaaaagccctgctacagatatcagcagcagctgccacattccattcttcaacagatttcttcgctttttatatcccaccagcacgatcagccacgtacaaagaacacctccgcttgcaaatcctgcccataaaaacccagatggaagcatcagatttaccatccagctgagcacaaccgcagcaatacacaaaaatgtaaagatctgcatgctcttttgcatcaaacctggttttttttcctgataccctggaaaatcatttttctgctctgttacgtgaattccttcttctttcaggattcgcagaaaattccgctgaatgttgctgctgagtattttggatgtaataccaagacgcaatgtgtcaccataagagcaggagcacatctgcagcttatccgtacttgtaaagaatccaaaagagtcaatataagaatcgaagatatccggaagctgaatccttccaatattggaatagattgcggagatgcttcttcctccaagtgtcgtccccgccatcagaaacaaattttttatctccaggggaactgcccgaagaagaggatttttttcgagtcgcaccaatcggttcatattgtctgcaatccgttctttcacaagctctgtctgaaaaatctgctgcagattctgtaacacttcctcaaatctcgtagtctcttcaaacacttgccctgcttcgatccatccgaaaaaattcgtcatggaagaggacggaaaataatttcgcaaattcacgggtaccatcaacgtcacaggctttttcatctggctccttggcatctcttcatggattgcacaaagaagtgccgccgaaagaaataccgtaacagacactccgtatgatttggcttttctgtgcacctcttctgcagaaagaatcaattccagaattgacatttcttcctgctccagccgttcccccttcaactgaaatgcaggtctgctcttcttcatggttccatgatctgctctggaataatactgggaaaaactgtcttcttcgtgatcactctctgtggagatctcttcttctgaaagagacggaaatggaatcgaaggatactgtatcaccaaatagttacgcaccaattccttcaaaaagttcaatgcgccggttccatccgtcagacagtggaacacttccagattgatctttttttgatagtaagaaacttcaaacagaaaactcttctgatccggtacatacaaaccactgcaaggcggacggtcttctgccttgacttttggctttaaattgcgctgttccatataaaaccagaacaagccttttctgagaaccgaacaatacaggggatatttttccaatgtacgctccaccgctttttgaagagtctcttctttcacatcttcttttaattcacaatacatccgaaatacccgggtatcttttttcccggttgccgccggaaatgcctgcgctgcattgtccagttttctccactgcgaacgtttctttttctgcatgtttacccctcccgcaaaaaatgatcaatatatgcaaaactctcctccacatgaagccgggatgaacccaacgcaaaatagccatgaaatgcgcctttcattcgataagacaaaaccatatttcctgcttccttgagtttttttgcataatcttccccctcatctctgagaggatcgaactccgcactcaacaataatgtctccggcatatttttcagattttcagccagcacaggcgctacatacggattttgcagatcttcaggctttccaatataaagctgcagataatcatgcatttttccccttgtcagcaaatatccttccccgttttcccgaatggaatcatacacagaatccaatgtatagcaattattgactgccggataaatcaaaatctgcttatgaacatgaaattcacctcggtcccttgccaacagacacaacgctgctgccagatttccccctgaactgtcccccatgaccgaaatctgtctgggatctatctttggaaaaatttttccatggtacaatgcccttgctgccagatagcagtcttccagtccagccggaaatggatgttctggtgcaagacgatattcaaccgacacaacaatctttccaactgctttggaaagcatactgcaaattctgtcataagtctgtacgctttctgtggaccagccgcccccatgaataaaaaagatcacagaagtgatggaatctttctggcttttttcctcttttgaagggaaatagagtcgcagcgggattttttcatactctgtttttatcagaatatcttctttttccgcccacagatgtacgggatctaacttttttaaatctgccagctttctggctgtctttatttcaatgttctggttcgaaaatgctcccagaactgcctgtatgatctgattcataaatcatccttctcctgttgtatttctggacttttattataacacagaaaaaagcgaatgccatcccgactttggccgggagcggcatccgctgtcatttattgctgaaatcgattctctactctccgaggaaatagtgaccataggcatctgctgctttgatcgcatctgccacggtcttcggtgtcacttcaaatggcatattatgcagagtatctgtctcggcacaggctgcctctgctacctgcatcaactgctcttctgtaatcttgccagctccaagctgttctaacgtaaccggcagtccacattcaatacagaagtcgatcacctgctgcagttcttctgatgggatattctcaagtaccagctgtgtgatcgttccaaaggctaccttttctccatgatacatatggtgacattcttccagaaccgtcagaccattgtgaatggcatgagcacctgcaagtccgccgctttcaaatccgattccagacaacagtgtattagcctcgatcactttctctactgattctgtacatgcacctgcttccagagccagttttgcttttacaccttcttccatcaatgtatcaaaacataattttgcaagcgccatcgctgctccggtaatctttccgcctgcacaagatgccgcatctgaattcttacatgctctggcttcaaaataagtagcaagcgcatcacccattccggcaaccgtaagacgaaccggagactctgcgataatttctgtatccatcatcaccatgtccggattggatggaaggaataaatactcctcaaacactccttcttctgtatatattaccgaaagtgcgctgcatggtgcatcggtagaagcgatcgtcggacaaattaaaaccggtgtcttttcataatatgcaacggcctttgcagtgtcaaagatcttgcctcctccaatgccgatcacaacgtcgcacgcttcttttttcacaatttctcccagacgggcaatttccttcttgctgcactcaccattgaagtaatcaaaaacatactcacattcttttccttcaaaactttgttctaccatcgctccaattcgcttgtatccacccttgctgatcaggatcagagctttctttccataattctgagcatattctcccaattttttcatttcgcctgcaccctgtacatattttccagggctgatcaatacttttgccatctgtcaattcctcctgctatcttttgatgtgattttttgttaatattttatcacattgtactgcattgttcaatgcaagcctgcataaaatgatcccattccctgtttcaaaatgacttggatcgtcctgtttcctaaacatttcagcagtatttctccagatattcccgaatttttttcaccatctttggacttttgccgccggaattcatcccaatcacgacaccatctttttctgtcactgcaggaaaataaaaatcgcacagagatctatcatccgccgtgtttactaaaatattgcgcattctgcacgcacttacgattgtttgatttaattcccgatcatcggtcgcagtcagtacaatgtctgctccatccagaaagtgagaagtcccatccagatcttcctctatgattttgcgggcattccacactacctgaggctcttccttcgttgtctcttcttccagaattgccttcatttcatcgcaaacttcaggtgctgtcacctcaatatgctctgcaaatttcagcaaggtacgcactcttcttgccgcaattttcccgccgccgatcacaagaatcctcttttttgaaatatccacaaacattgggaaataatatccactcatctgttgctctcctctgtcactttttttcatccatcatatacaaaagtgcattacagatacatgctgcaatgttgcttcctccctttcgcccctgtgctacaatatacggcgtatcctccagggacaggatcaattctttggactgtacgacattgacaaatcccaccggaaccccaatgatcagttctggttttaactgtccttcccgaatcatctcatagagacggatcaatgcagtcggtgcatttccaattgcaaagatcagttttttatccatctgtgctgcacgttccatactggcagctgcacgcgttgtcccctgcttttttgccatatctgcagtctcttcatcggacataaagcagcatacttctccgccgtactgcgccagttttttcttattaatcccagattttcccatctgtgtatcggtcacgatccacgctccgtcacggattgcatccattgccttttgtacggcgccttctgaaaacttcaaattctgtgcataatcaaaatctgcacttgtatgaatgcaacgctttacaatgggctctgttcctggaatcagactgattcctcccatttcttctgtgatgatctcaaaacttcttttttcaatgtcctgcggcaatacattttccacttctatcttcatctgtgtatttcctcctttatttaatcctgcttccgatcccgcattgtacccgatctacccgctctgcatgagcagccagattggtgcagatccttccgacacactccctgtactgtctttcccttgcatcgatcggaacaagaccgtatccgatctctgttgttacgatgatcagctctggattctgttctgccatctgctctaccagatccgctacatgctctgcctcatttttcagtaaccagcgcctgatgtattcgtcaaaatgaaggattcctgcacaggaaaaaatttctccaaattcacaggatgccccatcaatccactgtatctctggatactcctgtcttgcatattcttctttcccctgatacgcccctccgattaccattttcatttcttttttacctccactggtattccataaacaacttctgtcacccggtctgccacctgtgccatccgacaattgatccttcccagaacacgcaaatattccttcatttcttctgtatccgggggcaggtcacaaaacacttcatttgtcacgaccacaagtcccctgcatcgtttttttaacattcggattccttcgagaaccgcttcttctgtctggctttttgctcccgtatccagatacagctcatttgcagccagattggacatacattccaaaagaacacagattccttcattttctgtaccttgattcagacgtggatccgtctgtacaagttgtttgagatcggtgaagcattctatcgtttcaaaccctttcccactgcgcatctgcctgtgacgcaaaatcttttgtctggtttcttctccatatggaaccatggttgcaagataatacatatgacgggaatccgtctgttctttcagaatgcaaacctgcgcttctgcataagcagatttcccgcttccgctcccgcctgtcactacatgaaacatctcagtctcctttcacatctgcatatcgatattccagtgctcctgttgccggaatctgactgacaccagtgatatccggccggatcagattacagcttttcatggaaaacaacggaatgatataaaactgttctcccactgcccactgttccgcttcgtggagcagtgtatttcgcttcacaggatctgtttccacattggacgcctcaaccagacggtcatagactgcatcccgtactccactgcagttatacgttccattggacaacagcatggacagataggtatacggatctgcaaaatctgctgtccagttcatccggcagagatcgaattttcccgctcttcttgttgcataattggtttgtaactcctgtgcttccagttggatttctatattcagattctgcttgagctgctcctgtacaacctgtgccgtatctgcatctaattccagagacgggtacttgtatgtcagaatcggaaatcccttcccatccggataccccgcctgagaaagcagctctcttgctttcttcacattttcttcaaatggcggcttctcctcttctacaaaatactgaccagtcgtattgtttttcatacgttttgccacaaaattcacagtcggttcggtatcctcccccaccattttgcacaactcttcccgattgatcgcgagattgatcgcctctctgacacgaacatcatccaaaggctttacctccagattcggatatatataacgtgtggcaatattgtctgtcacaacaaggtcttcttgtccccgatacatctccatgacaatcgaaggaagagacactgctacatcgacttcttttgtttcataggcgctgaccattgcctgctgctcttcaaaaaaacgataggtgatccgttccagatgcacggcatctgcattccagtagtgctcattttttttcagcacaaaatattgctccggtacatatttttcaagacaaaatggtccgtttgacaggctggtctctggatttttatcccagccgcttcctgtttcttttgcatatctactgcaggatggggtatacaccgggagacgaagaagctccagaaaatacacacaaggctgactcaaagaaaaaatcaaagtgttgtcatctggtgtttccaccccaagactttccatctcttcctttccttcatagatttcctctgcatgttcgatcggaaacagataatttgcatatccgcttccgctttttggatccagtgcccgcacgatcgtatttttaaaatcagcagatgtcaccggtgttccatctgaccagcatgccccttctcttaaatgaaatgtccacttcgtcgagtcttcattcacttcataagactgtgctgccctgtattcaattttcccattttcatcaaatgtcagcagctcatccaatgctgtaacagagtaagacagatacgtcaatgcgatatttcccgccggatccatcccgccggtttcactgttcactgcaatcgtaatttctttttctgtacgtgttgagttcttcttctcgtccgaagccgcacatcctgctgtcatgcctgccagaatgcagagacacagggcgatcgctgtcatttttttcttcatgctcttctccattattttctcgttttttaaatctgtgaagtcatctggtaatcctttgcacgcttctttgtatgcgcttccgagtataaaaagcagcgtacttcccggtcaccaaaccgatagtttccgggcttttccctgtagcagcactccatggcataccgacatcgggacgcatatgggcatccctttttcagatcccgggaatgatttcttgtctcttttaaaatcagccgtttctgtctggctgcctttttcggatcaagcggcagcattgcccgcagcagttcttttgtatacggatgccacggatcctcgtaaatttcttcggtcactccctgttctaccatacttccaagatacatcacgcccattctctgactgattcttctgaccacatgcagatcatgggaaataaacaaatacgccagatctgtttttttctgaatttcttccagcaattctaaaagctgagcctgtgtaagaatatcctgagcggaaaacgattcatcacagatcagcagttccggacttgaaagcatcgcccttgccactgcaattcgctgacgctctccaccggaaagagcagctgttgtttttctgacatcgattttttccatccgaaccagtctgagcatttttttcacttgtctttcccgctcttttttcgaacctgccttctggatcaccagaggctcttccagaatccattccactgagaactccgggttaaaagaggcagcggcgtcctgaaagatcatctggatcttccctttacaggaaaagctcccgcaactttgcttaatgatccccgtcaatattcttgcaagggttgtcttcccggaaccgctctcccctaccagaccaaaggtttctcctttctggatctggaaagacaacggctccactgcttccaaagagtgagattttccgaacatgaatttttttacaaaacttcttcccagattttgtgcctgtaagataacttctcctgtctcttttttctccggcatctgatacagtgtccttgcacgatccaacagctcctttgtataagggtgcaccggttcataaaaaatctgtttcgcatctccatcttctacgatccggccttccttcatcaccagcactcgactgcacatggacatgatcacccccagatcatggctgaccagtatgattgctgtatgagtctcctttgcaattttctttaacagatccaggatctgcctctgtacagtaacatccagggctgtcgtcggctcatctgcaatgatcagatccggattgcaggcaagtgcgatcgcaatcgccactctctgtttcattccaccggaaagttcaaatggatactgcttcatccgttgtctgggattttgaatccctacttcgtccagaagcatttccgcctgctctgcggcttcttttctggtgcatttccgatgtgcccgaattgtctctgtcagttgttttccaaccaaaaccagagggttcagcgatgcagaggcatcctgaaagatcattgctttggttccatactgctttaatttttcactggttatctgaacctgatccggcaaaagtcccatcaatgccagcattgccgtgcttttccctgcaccggaagcacctgcgatcccaagcagttcccccgactctagctcaaaggagatctgacataccggatcggtatctcccgggtattgcaccgtcagattttctacttctaacagcttcatcttacattcccttccttcttctgcagatttttgcttccagtcctgctccgatcagatgcagagacaaaatgagaacacacaacacagcagtcgggaaaagcatctggtaaggatgcacaaaaatctgactcctcgctgcctggatcatcgttccaagactcgctttcggagcagggatcccaactcccataaaactcaaaaaagcttctgtgaaaattgcctgcggcacgagcagcgtcagactcacaacaacaggacctgctgcatttggcagcagatgcgtcagaaagatccgaagagaaccagcccccgccatcctggaagccagaacaaattcccgctctttgatccgcatcacttctcctcttacaattcttgctgtctcgatccatccggaaatgcaaagtccagcaagaatactggtctcatttgcacctaacaccatcatgatcaggatcacatacaaaagagacggaatggatgccacaatatctgcgacccgcattagaagattatccaccgtctttcccgcatatcctgcaaaagctccatagaacccccccagtaccccgtttaaaagcgcgcttgcaaggccgacgcaaagactgatccgcactccgcaccatacccgcacaaacaaatctcttccaaatttatctgtaccgaagggatggagccaggacattccctgattgcggatatccgcatgcatttccgtggatgaccagggtgcaagcaccggaaccaatacagccagaacaatacagaggaatagcaggagcattcccaccgtcatttttccgttttttctcatatttatctgcttcattgtttctcctttgtggtattgttactcttcatttacatagcttttgcgtactctcggatcaatgcaggcacaaagcagatccactgccagctggatcaggatcacaactgtccccataaagatcgtcaaccccaaaatgagagtataatcccggtttgcaatggaacttacaaactgcctgccaagccccggaatggtaaaaatactctccaccacaaaacttccggtcaaaagaaatgcacttgccggccccagataattcaataccggaatccagatatgcggcaaaatatgagtaaacagaatctgtctttttctgagtcccttcgtacgtgccagaagcacatactctttttctttctcctgtgcaagaagtgttcctgtcagccgtgccagcgaacaggctggatacagcgccagtgcacacactggcagaacatagtttttccaggagtccattccgctcaccggaagccatttcagccagactccaaacaccagcatcagtaacagtgccgctacaaaatttggaattcctccaatcagcagtgtcccggtaaaaaggcctccccgaagcagcctgtgtcttgaaaaggtctgccagactccgattccgatcccggccaccagggccaaaaggattgccagtcctcccatcattgccgtgactggccaggctctccggatgatttctatgacagactctgacggattctgataagaatagcccagatttccgcatagcaaatgtttcatatacgtcacatactgtactccgatcggctgatgcagtccgtattcttcctccagcatctgcagcacattttccgatacatttgccccctgaaaaggacttcccgggattgctctggtcagaaaaaatgtgacagttgccagcacaaataaggaaagaatccccattgccagtctttttcctatgtattttgccacctcatgttctcctccctagttttctgccagttccaaaatctttgacaccatgcttgctacggatgcctcctttgaaatctgcacctgcatcccatatttttttgcctcggctgcagtctgttctccaatgcagactgcctgtattttggcagtatctacttcagggagtgcctgaacaaatccccgaacagtcgatgcactggtaaaggtaaccagatcgatctctccctgcgcctgcatcttttcaatggtttcctttaaaatgtcctgcaattcacagactgtctcataaatcggcacatcttctaccaccagtcctgcactttttaacggcggaatcagctcttctgatccttgtttcgcccgcagcaatacaatccggctctcaggtgacgccacttttgcgattgcctctccaagcgctgatgcacagaaagtctccggcacaacatctgcaaatacgccaaattgttccagttctcttgctgtcccagaaccaatcgccgcaacttttacctgtggaagaaatacctttcttacatccattttcaacatctgcatctgtttccagaacgtctgtactccgatcgggctggtaaacacaagccactgctcgccttccttgtgccggatgctctccagtgttgtcccaagagaatcatttggccagattgaccttgtggtaatagaaggcatttcaatcacctgcgctcccaattctcgcaattttaccgagagtctggagctattctgtctcggccgggtcgtcaaaatctgtgttccccacaatggaagatctgatacccagtcgaatttttcagccaatgtgcatacttttcccacgaggatgatcgccggtgtctgtacctggaacgcttttgcatccttctccagtctgcaaagtgtgctgacaagccttctctgttttgatgtcgttcctttttccagaaccgctgccggtgtattttcatccattcccgcctggatcagtccctggcagatttctcccattgccgtgatccccatcaaaaaaatcagtgttccattcagctttgcaagggcttcataagacagctccattttcttgccctgctttgcatgtccggtaatcacatgaaaggaagatgcataatcccggtgagtgaccgggatccccgcatacgccggaactgcaagtgccgaagtcacgcccgggatcacttcaaacggaatctcttctgcttccagacattctgcttcctccgctccccttccaaatacaaacggatccccgccttttaaacgaaggacctttttccctgctttcgcctcaccaagcagaatctgattgatttcttcctgacggacacagtgatgaccggaacgttttcccacatagatccattcctttccatccgggatcagactcaaaatttctgcactgatcagcgcatcataaatgatcacatctgcctcatccatgcattttttcacttttaatgttaaaagagatgcatctcccggtcctgctccggcaagccataccttgccggatggagattccttcccatactttttttccatttcatctgccagcttctcacccaatgtactcgcttcccccactctgccacttattttctctacaaaccaactttcgtctgactccctccagtacagccccgtcagctgacactgagattcccgtatttctgcatatgccgccaccggcgaggtacagcctccatccagtgcttttacaaatgcccgctctgcttttgctgccgcttcagactgtggatcattgagcaattttgcgagctcttgatattctccggctctcgcctgcacggccaggataccctgtcctgcagcagggatcacctcttcacaggaaaaatatcgcccaatacaagattccatccccagtcttttcaaaccggctgcggccagaaccgtagcgcaaaatccttcttcctccagcttgcgaagtctcgtctgcacgtttccccggattccctgaaatgtacagtccggatacagcctctcaagctgcagtctccggcgcttgctggacgttccgatcactccgcctaaaatcagatctttttgtcctttcggatagatcagcacatctcttggatcttcacgcttactgtatgcaaggatcggaaggtcttctggaatgtccatcggcatatctttcaggctgtgcactgacagatcgatccgtccatcccgcaacgcctgatccaattctttgacaaacaagcctttgccgccgatctgttccagactccggtccaaaatccggtcgcctgttgttttcattgtcacaatttctacccgaatatccggaaaatgagcctcgatctgctcttttatgaatccggtctgtgtaactgccagcctgctctctctgcttccgatgcgtattacttttttcatggcatcctcgttcctttccccagaatctgataaatataattcatatccatactctcccgtataatatctgccagtttattgtactgtgtctccttataggtatgccagtcctgaagttcgatctgtccggcatcgtatcctttttctttcaaaagagccgatacaaaaccggctgcagtgctggcatgatcaaaaataccgtgtacataacagccgtaacagctgtttttccgggcaccatcatatcgagtccgtttttcgcccgtctcctcgcggatctgaaccaacggacaaggctcttgtgtataagctgtcactcccatatggatttcatatccttcaagcggcacctgacttaaactgctcagacttccagaaagtccttcaaacctcccctgcacacgggttcttgtcttttcccctgcgaacacggtccgaatcggaagaagtcccattcctttgagttctcctcctgcttctaccccctctggatcctgcagaagttctcccatcatctgatagccgccgcagattccaaagaccgtttttccttctgctgcatgacgaaggattttcccttccagcccacactgacgaagccacttcagatcttccatcgtatttttacttcctggcaggatcaccgcatccggaaccccaaactcctgcacacatgttacataccggacactgacttcctccatggattccaaaggcatcaaatctgtaaaattcgagattctcggaagccggatcacagcaatatccagaagccccttcttttctctgtgtgcaaaccgttcgctcaagctgtcttcttcgtcaatatccagatgaaaataagggaccaccccgcacaccggaatctttgtcttctcttccagcatctccagacccggacgtaaaatttctttgtccccgcggaatttgttgatgatcgttcccttaatccttcttctctcttgttcctccaaaagttcaatggttcccacaatctgagcaaacactccgccccggtcgatatctccggccagaagtacaggtgcatccgccatctctgccattcccatattcacaatatcttcacttttcagattgatctccgccggactgcccgcgccttcaatgacaatgatatcaaactgttcatccagcttctgataggcgcttttgatcaccgggatatactctctttttctgcgaaaatattccattgccgacatcacgccctgcacttctccgtttaagatgacttgggaaccggtgtcattggtcggtttgagcagaatcggattcatgatggccagcggttcgatgcctgctgcctctgcctgcataacctgagctctccccatttccaatccttctctcgtaataaaggaattgagtgccatattctgagatttaaacggtgccactttgtacccgtcttgatgaaatatacggcacaatccacctgccagtacactttttcctgcatttgacatggttccttgtatcatgatcggtgctgccattctcgttttccccctttgtaaatctgttccagtgctttcagtaatgtttcattgtcttttctctgcctcactgcaatccgataatatcctttcttcagccccatataattggagcagtcccgaatcaggatgttttcctggagcaggagcgaaaacagcggatacggactctttaaaagaagatagtttactttggaaggaaaccactctaccccgatccgggtcagattttcttccagccatgtccgttctgtttccagccatatccgcatctcctgccaccgtccggtttcctttaacgcagcacagcctgcagcctgtgccacaccggatacactccacggctgtcgatttttttccattgtttccagcaattccagattggatgtaatcccgtatccgatccggattcccggaatcgcagaaatcttcgtaaacgcttgcagaatcaccagatttctgcttctctggcattctctgtaaagtgtctgcttctctggttctgccaaaaattccacaaaacattcatccagaaccatgagaatttctttttcttcacatgtttttaaaatttgaagcagaaaatccttcggaatcaccgctccactgggattgtccggagaacataaaaagagcagatccacatcctctgtcagaagatccagataggactcctgcggtatccacccgcatttctcgcaaagtggatagtacacacattcacaatctactgcctcaagtgctctatgatattctgcaaaagacggaatcgtcagaaccgcctttttcggacgcagagaatgtgccagtaaaaagatcagctccgccgccccatttccaaagatcaaaaactcttccgaaatctgcagatattctgccagtgcccttctaagtttccggctgctgctgtccggatactctcctgcatgcctgaggctttcttccatcgccagaagaacggtctctccagggccgaaaggattgagattaacagaataatccgtcacatgatcataggtgtaaatatctccgccatgcatatattccatgtttttttctcctttcctattaccagaaataccagaaccggagcaatcctgtgaacagcagcgtaagtacttccgtcatatacatcagtgttcctgcccgtttgatatcatccgcttcaatggggcggattggatctccaatggtttcttttttatgcaacacgccaaaataccacgcatcccctgccagctgcacctgaagtgctcctgcacagacagattcggtctgcgcagaattcggactggcatgttttcttcggtctctcttatagatctgcgctgcttttttcccatccattccagtcaaaaatgctgctgcaatcatcagaaacgccgagaaacgggaaggaagatagttgaacacatcatccattttcgctgccacttttccaaagtagaggtttttctcatttttatagcccaacatggaatccattgtattgactgccttgtagaaaaatccaaaaggagcgccgccgagcatcaaaaataacagcggtgcaatcactccatccgatgtattttccgccacagtttccaccgctgccttcgcgattccttcttctgtaagagactgggtatctctccctacgatcatggagaccgcatatcttgcaccttctacgtcctgctgctttagagctttgtatacttttctgctctctacacagagcgaacgtgctgccagaatctgataacaccagaagctttccagaataaaaccaactgccggatggatcttttctgctgcaatcaacaacaacaacaacgggattgcagtactggccgtaactaccagaagccataaaattcctcctgccacaatctgttttttctgcgaattcccagctgcttttctgagcggtttttccaaaaaagaaatcagatgtccaatcaatctcaccggatgatacagccaatacggatctccaaagatcagatccagcgtaaatcctgtgatacatgcaagtaatattttcataatttttctatctccgtcaattgttttttcccctgtctccaacagccttctgcaacagtcaccgcataaccgctgccatttttgacctgccagtcataaaatcccccgcccgactcagaatacgccgataagattgccataatcgttccaccgtgtaccacaaaaactgcttcctcacaccggctgtccatcagctttttcagtatctcctcaaacccccggcaggttctcctgcaaaacgcatctgttccctctccttccggaaatggaagggttccattggaatccagccacttctgatagtcgggatcgttctttaattcttcgtagttttttccttcaaatcgcccaaaatccatctccctgaaatcttcccagagcagatccggcgctctttgaaacaactgctctgcagtctgtcggcagcgaagcattgggcttgcgacaatcttcttcggatcacacagaaccgtccctgtctgtcccggcagaatgggttcatctgttcttccgatataacgccgttccagatttccctgtgtctgaaaatgacggatcagccagattctcataaaacgcctcctgtaaaaacaactgccgccagaatgaataactcgcaaagctgcagaaagtagccggccagatctcccgtcataccgccaaactgtttcatcgccatgtggtgataatacccgaaaaccaggagtgccgtgcagatcactgccactcccatctgtaccgaagctgtcaacagtaccagagctgccgcagcaaaccagcagaccatcactgctgttactctttttctatgtgcctgttcctgaaaagtttttccaagcccgtcttttttcgcagatggaaacatcatcacagacattccactcaaagaacgggacattacatatcctgcgccaatccccacaagcatctctgttcgcacctcactccacagagccagacttgctacaagataaagtcccagcccgatcactgcaaacgctcctgtgcgagagtcttttaagatctccagctttttttctctgctcccgtaggaattcagcgcatccatcgtatccagaaatccatccatatggattcctccgttgaccaacaccggaagcaaggtcatcacacctgcgaaaaacaacgttttgcaggatgtgtgaagcagaagtacatttccaagaaacatgaccagaattcccgtcaccaatccaaccaaagggaaaaagcacatcgcatatttcatgtttttttcattccattccacccgcggcatcggaattttagaatacatggaaaccccgatcgccaaagactgaaaaaatctcatgttaacacctcatactgttcaattttcgtatcttcaaacatagtcatctcccgataaactgaaagccccatttccaaaaccggaagtactgccaccgcgccggttccttctcccagactcatattacagatcaaaaacggagtaagccccaatgcttccagcatcatggcccccgccggctctttggatacatgagaaggcagaaaataattttttgccattggcaccatgcgaacggcgcaaagcgctgccacagaagatataaatccatcgatcacaatcggaacacgatacagggcgcctcctaaaaagactcctgccagccccgcaatatccaggccgccaacttttgaaagaacatccaccggatctttcggatccggctgatagtttgcaatggcatctctgatcacagaaatttttttctccagtccctggctgctaagtcctgctccgcgcccggttacctgttccggtgcagcggataacaacactgctgccacagcactgctggtcgtcgtatttccgatccccatctctcctgtagcgatgatctcatatccatgttctttgagctgtttcacttttcggattccaatttcaatcgcctgccatacttcttctcttgtcatcgcaggctcttttgaaaaattacgtgttccataagtaactttgtcttctttgacagtcactgacggaacatccactgccattccgatatctaccgggaaaagatccacaccggccactttactcatcgcacagacgctggtgcttgattttgtaaaattatccgccacgacagccgttacttcctgaccggtctgtgtaaccccttcctctacgatcccattgtctgcacacataatgaccagcgcttttttcttcagctcataatccagagtttccttaatccccgccatctggatcaccgcatcttccagtttcccaagggaaaacaacggctttgcgatcttcatccagtgtgctttggcctgctccatactcgtttcatttaaaggtttgatcctgttttttaattcttccaatgtcatgctctttcacttccttctttttgagttgctcccactgagtcactgcctgtacaaaccgctcgacaaatgccggatttgatacatacgaaaggtgtgggaatcctgcaaacagattctgctgcatatgaatacattcccagcttctcttcccatccggtttgactgctcttacatcgtttccattatttgtactgtcccaataatggaactcatgtccgcggattgtctcaccctgcctcaaaaaagccccgtccttttctccggtcagatggatatatccaaatcgcaccagtttttcttttggcattgcctccccctcgatcacaccggccatcttccagcgcctcttttccggatctgcaagctgttcatgcagatagaggaatcctccgcattctgcatgacagggcatcccattttgaatcttttcccggatctctgcgagcaatgtcttatttttgcttaatctttcggcatacaattcgggatatccgcctcccaaaagtagtccgctgacaccttccggcagatgcgcgtcctgcaaagggctgaaaaacatcagcttacatccttgtttctccagcaattccaggttctctttataataaaatccaaacgcctcatctcttgccactgcaatggataccttgggccttgcatactcttttacaacactcacatccattgacggtgcctcttttgccaggtcataaagtgcgttcagatcaacagtctccgaaaggatctccccggcctgatcgagctgcgccttcagatcctggatttcttccggtgtgaccagtccgagatgccggctctccagacgaaatgcttcatgctccggaacataaccaagcaccttgatcggatgtcctgttcttttcagttcgttttccagcatatctttcaaacggggatacaacattgcggaaacacggtttaacaaaattccacggatccggctcctgggcttgaattctaaaaagcctctgaccaatgctgcaagcgaaagcgcggatcctcttgcggaaacaaccagtacgaccggcatctgaagcgtatctgccacatcatacgaactggcttttgctgtatccagtcccattccgtcataataccccatgaccccctccgtcactgccaaatccgcatcttttgcatgttctgtaaaaatccggatcatctggtccttttcgcagaaaaacaaatccagattctgagaatcgattcccaacacctcccggtgaaacatcggatcgatgtaatctggtccgcatttgcaggaaaccacttttttttgctgtctgcaaaatgctgccattagtccacacgaaatcaccgttttcccacttccactggacggtgcagcaattaaaattcttggaatgttcacacttctccctccgaaataataaaaatcgggttttgtcctgtcatcatgtgatgacgccccagttttctggcctttgccactgtaatctgcacaatttccggttcccgcaaaatccccgcattcactgctcccatcacttctgccatggtatccagcgaaattgcggtcaatacgatccgcactttcggatttttttctttcactgtatgtacaatttctcgcagatttccgttgctgcctccgataaatacatgggtcggcgcttccagctcccgaagtgcttccggcgccgtcccctgtacaacctgtacatgatccgtccgcaatttttgcgcatttttgcggatcagttctacaccctccggatttttctcaattgcatacacacgaatccttccgtcctgacaggctgcttctatggcgacagatcctgttcctgcacctacatcatagaggaccgcatcttttgtcagttccagttttgcaagacagatcgtccgcacttcttcttttgtcatcggaacttttcccctgataaattcctcatccttcagatgtctgcacaccttctcacacggatctggattttccagatatgcgatgcagagcccctcggtatcttccgcaagaagctctcctgccggttttgaataaatctgctcttccggataggaaaaattcttgccgatatgaactgtcacgtcaccaagtccatagtataaaagcttttctttcagattttctgtttttccacccagcagcagaaatgtctttgcatgatgctctactgcaaagacccagttctgccgccttccatgaagacttacaagggctgcatcctcccaggaagtgtgaagtctggctgcaaagtatacaacggatgaaatgcccggaattctttgcacctcatacgtttcttcactttttttcaaaacttcttccagcttttttgctccgctgtaaaacccggtatccccggacagtacaatcccgattttttgaaaccgaggatgctttcgaagatattcttctattttttccggcacatattccgcatgacagacaccgtttacatccgacaccacttccagaagccgttttgcaccaaccacacagtcgcagcccttcagaaattcttttgcttctgcagtcataccttcttttgttcccatcccgattccgatcagataaatgctccttttttctttacacatcccgataccctctcggtgtcaccatatgaccattgatatttcgtgtctgttcatttccgataaacaccgtcgtaaacatatccaccctggtgtcttttaattccttcagcgtaaggatcctgctctcctgtccgtctcttccgatctgtctgacgactccacataccgtgtcttctcctttgtattccagtatcatatcgcacactttttccagataatcatgccgttttctgctggacggattataaaggcagatcacaaaatccgccatagccgctgctttgacccgtttttcaatcttctcccatggtgtaagcagatcgcttaagctgatgaccgcaaaatcatggatcaacggagcacccaatacggctgcaccgccaacggctgccgtaattcctggcacaatttccagttctacttccggaaactcgacaccaacctcatacatcaaccctgccattccatacacgccggcatccccgctgcagatcatggctactttttttcctttcattgcttcttcaaaagcgatctgacatcgtttcacttcctgcttcatcggcgtggtcagaaattctttttccggaaactgttccttcacaagatctacatacaccgtatatccgatgatcgcatcgcaggcacaaagtatttccctggcttcttctgtcatctgttttcctgccccgggaccaatcccgactacatatactttattcatctgcctgctcctccttttttccctgacgaaattctgtggtaaattccggatgatacaaaagtgatctctcatattctccttccagaattctccccactacgatcagagctgtttttgtcacctgtgcatcggccgctgttttctccagatctgagaccgtacagcgcagcactttttcatccggccaggttgccttgtatacgatcgctgctggagtatcttgcggatatccgcctgccatcagctccttttgcagctttcctaacattccggtactcaaaaagatgaccatcgtcgcctgatgtgctgcaaagctgcggatcgactctttgtccggaaccggagttctgcccgccattcttgtgatcaccacggactgggaaatatccggcagtgtatattctgcttttaatgctgacgctgcaccgcaaaatgagctgactcccggacacacttcatatggaatctgtttttcttccaaagcatccatctgctcccggattgccccgtacaagcacggatctcccgtgtgcagccgaacgattcgttttccttccttttctccggcacacatcacatccaacacttcctccagcgtcatataagcactgttatagacctcacagctttccttcttcacctgcagaagtcccggatttaccagtgatcctgcataaataatgatatctgcttcttttaaatactgctgcccgcgcacagtgatcaggtcttctgcgccagggcccgctcctacaaatacaatcacttttcctctccccttctgttctttttctctttgacgataaacaatgaataataacttgcttcatccggaatttcttctgccgaatgatagattgtctcattttccataccacagttttctatcattgtaaggtttaaattctgctctttcataacctgtttgacataaggaacctttcgccccgctttcatcagcacctttgttccaggcattttcagtccctcttcaatctcataggaggcaggaataatatgcagttcgtcctgattctccacaaggctctgatccagtctcgctgccgctgcacaaaaagacggaacccctggtataatctctgtccgatacccattctttttgattcgtttatgaatatacatacaagtagaatatacggtcggatctcccaacgtgataaaaaccacattcaatccctcatccagcagtttcattgtctttttcgccccatcgtcatgtatctgacgaagccgttccttttccttcatcatcggcatcggcagatatagttttgccttttctttcattgctgcctccgcctgcactgcaatttgataggcgacacagttgtccagataacacgtatacgccggatctgttccggtcggatcatacactgcctctataaaatttttatccgataccggaatcgcaatgatctcacactgctgtatcacacgcaatgcctttatcgtcaaaagttccggatctcccggtcctacccctgctccataaaatattccgctcattctgtttctcctgtctctttcttttttgctgattctgtgcgcagcatttccaacaattctcctgcaccgtctgtttctcctaaaattccatattccgtagagaatacgattgcttctacacgaagagatccaccgcttctatgctgcagataaaatgcaatccgctgcatcaccgacttcatgacaggttttaacagattctccttttccagcagttcgatcatctctgcagtcgtaatactatgcatgattttgtggatcgtttcagccgaagcccctgccatcgctgcatgagaagcaaatacctccgctctgcagtctgcctgtctggaatgggtgttcatcacgcctgccgccactttgatcagctttccaacatgtccgatcagcagaatcccctgcattttaaggcataccgcgtgatcaatggattctccgatataattgctgcacttgaccgcaagatttccttcatacccaagtgtctctttcaagaaatcgctcccataattccccggtaccatataacagtacgcattcccgttttctttgagcatcttcatttccaggaaaatcgtatctgtcagtgccttctcgctcatgggctctacaatccccgttgttccaagaactgaaatccctccttcgattcccaatctgggattgaacgtcttttttgccagctctgcccctgccggaattgagattatgacagaaagcccacctgcatatccagagcgttccttctctttttccacagccatacggatcatctctcttggcactttgttgatcgcagcctctccgaccttctgttccagcccttttttcgttacccgtccgacaccgattccgccatccagcacaatctgctctccttcgatcttagacacttccgcatacaccaggatctgatccgtcacatccggatcatccccggcatccttacgaatcgcacaacgtaccttatccggggttcgcagactgtcttccacctccagatacagacggatcccttttggtgtcatcagagaaacctgacggatttcctccccgaaaagaagcattcttgcagccgcttttgccgctgccgctgcacagcttcctgtagtataccccattttcagttgtttctgatttttccacacaaacaccgattctgtcattgtgcctcctctaaatgttccataaaaatctgacggattccaggaagctctccaagccctcttacaatcggacggacttcatatcctgcttcttccagttcacatttccaggaatcttcatctcctgccatatcatttttggcatggtctcccgccacaaacataaacggcagaagcgccaccttacgatactgcctctgtttgatccgatgcatgacatcttttaattccgggaaaccttccacggttgccacgtgaatacggtcgtatcccagtgcctgaagcatatactccaatgccggataggcactgttcgcatgatggtctgttccatgtcccatcaggatcagacattccccttcttccagttccacatcctccatcactgcatgaatggtctttttgtaatcatccggttctgacaaaagtggcttcccgatctggattttttcaaaatatgccgtgtgttttttgatctcctccagcatcttttcattttcaatcccattgatgatatgtgtaggctggacgatcacctttgtgattccgtcctgtttcatgcgctccagcgcctgacggacattgtcatatgttttctgttccacccgctccagcttatttaaaatcatctggctggtaaacgcccggtacacgatatatcccggaaatgctcccgcaatctgatcttccatcacctggatcgtctttgccatcgtgtcaagatgacttgttccaaaactcaccacaagaatcccttttttctccattgtcccatccttcctctctcattttctatccaatcagctgctccagttctttccatgtctttggagtttttgcatcggaagcgatcacaccgcgtgcttttagccgatcgtataaccgcagcagagccggctcttccagattggtttctgccagtttcccggtttctctgcatacttcctccgaagttccctgacagagtacctttccttctttcatcagaacgatctcatctgcccaggcatatgcataatccatatcatgggttgccataagcaccgtgatcccctgttttgtcaattgatccaccatatggttgaccatacgggtgtgtttgggatccaaagccgctgccggctcatccaaaatgatgatctccggatgcatgaccagaatatctgcgatggaaacctgtttcttctgtccgccgctcaatgcatgtaccgggcgttttcgaaacggtgtgatctccaacttttccatcaccagatccacttcttctcttgcctgttctttttccactccaagatttaaaattccaaacgaaatctcctgctccacgctggcggaaaacagctgtttatctggatcctgaaatacgatccccacctttgcccgcagtgccagaagatcttttcttctgtaattcaccggctgtccatgaaagaaaacagcgcctttctgcggtcttaaaattccattgcagcagagaaaaaacgtagattttcctgatccgttggctcccataaaagcaactttacttccctttttgacttttaaatccaacccctgcagagaaaaccggtcattctcttcataagaaaaccagacatctcttgcttccaaaataatctcttcactcataatatcctctcccaaactgcgatcagaatcagcattgtctcaaaaaaaagcagcttccagtaatttttcctgtttcgcttatattctcctgaaagtacccggatcactccgtcatagcatctggactccatcgcattgtacagtgcgtccgactgcttcaatgacctcacaaatatcacggatgccatctgcccaaaagactggatggatgttttcagattccgatttccaagccttgctctctgcgctgtcataattgcagatgccccttccatcaggataaaaataaaccgataggtcaaaagcattaattcaataaatactgtcggaaaatgtagcctctttaacacatccagaatttccgtcaccggtgtgttaaaagacaggacatacaaactggaaacactggcaagcgcagtcaatatcatttgcccaccctttttcagtcccatccagctggacgtcacataatactgccccaccgaaattgcataggcatccaacggctctctggatacattgaccagaattgccagtgtactcaaaagcagaaaaatcaatgggatcatcagatatttcaaatagagtaccgcaggaaccctgcccttttttacattcagaaatccgttgactgccagtacaaccgctgccactgccactgagcggctgactacacagaccaacaatgtcagaaccgcatatataaatttttcctccggactcacatttgcaagtccagaggaataacttagtttatcaataactatcattctgccacttctttcgctctacgagacgtcccatacagaatgcgatgattcccacgccgattccggtctgtacacaaaacagcagggattctacctctcccggaatttctttcccaaggaaatcttccagcacaggtgtaaaccatggttcatattctccatgaatttcttctaccattacacttcccgcatcgtctgacccgccaaactctgcatccttcaatgtcaaaaatgggattgccgccagcaaaacaactaccaccagcagactgatcaccaacgtcctattttgtttactcatcttattttgcctccttcaaaaatccaaccgctttcagttccggttttgcataagactccagtgcgatcacgatcacaactgtaagcaatccttccatgactgccaatggaagctgtgtcggcgcaaacactccgaggaattttaccgcagatgctcccattcctcctgcttctgacggatatgccatcgcaagctgcagactggtcacacagtaagtgaacaaatctcccagaaatgctgccagaaatacagcgactttccgatttacatttaatttctggcacagcttgtaaattccaaaagagacaaacggacctgcgatcgccatggaaaatgtatttgctcccagcgttgtcaatccaccatgtgccagcagaattgcctgaaacaaaagtacgatcagccccagcacgcctgctgcagtcggtccaaataagattgctccaagtccggttcctgtcatatgagaacagcttcctgtcacagacgggatcttcaatgaagaaatcacaaacacaaaagcacctgacattgccagaagaatcagtgtttttctattctgttttaatgttttctgaatggaaaaaaatcctgcaacgagaaacggcaggcagataactccccatgcgatgcaaaatgttgccggaagatatccttccataatgtgcatggcatttgaagccggtgcgacggcaaacaataccgcaaatgcgatacttgccttccataagatgttctgtttttttgtcatgttcttctctctccttttcttttgacaaaattttctgaaatattccaggctgccaaaagactcaaaaagagactattttgcatacacccggtcatattcccgtaaccttccagattcctttaaaagcgggtgttctgacttaggcatcaaacacggtatctcgccttcccacagcatatgctacagtgacctcatgaaataccattactccaatacagcaacgggtattgtccgggattctcacccgattcccctgccgccttttttcggacggcatcttttaaatctgtttcgaatctgaatctatgtaaaaactctgcttccttcttctataaaaagcagaatccatacatacaaatgtatcagatactattcaatattcaattcctctgcgcgcacaaacgccacagtcaaacggatgctttactttccgaatctcggatacataatctgcagcctcgattaaatcttctgacggatttcgtccggtcagaaccacttccagaccttccggtttttctttgaaaaactcaagtgcctcctcatgtgggatcagtccatagtgatctgctgccataaactcatccatgacaagcatgtcatatgcaccactttttacctgttcaagtgccctcttccacaatgcggcatacatcttttgggtttcccttttctgcatttcggtttgcttctgataaaatccataggattttgacaggtgaatcacttcaattcctggaatccgatccaaaacacaaagttctgctgagttctcattttttaaaaaacgggtaaacaatactttcattccacttccggccgcccgtactgcaagtccggtcgctgccgtggtctttccctttccatctccacaataaatgtgaatcatcccctgtttcatgcctcttcccttcctgttcggaccttttcgtcaatctttctaaattttagcacagtcttacccacttttctataattttttttgtctcttttggtgtttttccactctcaatcggtcttccgatcacgatcagtacagcgcctgcttcttttgccgcctcaactttttctaaaaaaccgcctgattttccagattcttttgtcacaaaatatctggcactcagatcatttagcatggcaagatttagttctttggaaaaaggtccctgcatggcgatcagatgtcttccttcaaatccaagccggatactttcttctaccgaacgctgtgtagaaagaacacgggcatagcacctctgctgataatcagaaagccttgtatattcgaaaagttctttactccctgtagaaatcagaatatttccggttgtattttgaagcttttccactgcctgtgccacactgtctactcggatcacacgcacatcgtcctcttcccagttttgccattctcttacacatcttacatattctgtatccgtttttttacatgcctgttccacattttttgtcacttcaagcgcaaacggatgcgtcgcatctgctacaaatccaatcctgttttccctgataaactgacaaatctgtgcttcactcattcgtcccgcatgtacaatgatattggacgattcctctatattcatacactcttttccatactccgtagccacactgacgatcacctctgccttggtatccctgagagattctgccagttctctgccttctgttgtaccggaaaaaatcaaaatacgtttcattgtacttcctccttttttccaaattttatcacacattcgcggcagacgattgcaatggtgcactgatcaagacagatcttttcctgcaccagttgtccatttggacacatcttttttgctgcacgttcacagacattatctacgcctgtaattcttctgacaaattctgaagacgcactgactgttgaaatttttttcagttcctctgccgaaaatgtacaaaatccgacacccagagattctgccagctccaataatcccggttcctcctttttcagatcaatgcttccgatcgcacagatctgctgtggcaaaaatccatgctgtctgagtatgttcgacaattcccgagacaatatattcccggcactgcctttcctgcatcccattcccacataaagacttcgcggcagaaggtacagcgctcccggtatttctttttccggcatccttgtgcagattacaatttttcccctgcaggtttccagttcttcttcatttttacatagagtcagttcctgcggaatatctcctgaaacaggaaattcagagaaaataccggttttctctttttccagaattcctgctgatattttttttgcatgttccctgctggtaaggatcagcccgttttctttcgcaaaaacatccactgcgaactttttctgtacatctgtagctgtagtgatcaccgcagttccccccgtataatccgccagtctggaagccaattctaccgcaccgcccacatgtccggacaggagtggaattacaaactctcctgtttcatccaaaacaatgacagcagaatccgtaaatttatctttcacaaacggggcaaccgtacgcactgcaattcccgctgcaccgataaacaccagtgcttcgcttccccagactgtccctaactcttccttccatcccttcgtcagctctttcaacccacaatgctctgcaaaacgcgagactgtatatccctcacatacatatcctgccgcattcaacttctcacagagttcttctgacagatatcctcctgtctttgtaaaactataaatccttactttttttctctccattgtattcttctcttttcccattgctttcctttactatactatctgataccggttccgtcaaaacctatttttagctttcctttttgcatttttatctatttttcatttttcccctgcattttcatacatttctttgtataattttacccttgtcaatcttttactcctctgatattctgtttaaagacaaagatgtctgaaagatttacaaaaatctctcaggcatcttttttttgataaaaggccttttcagaaaaactattttcatcttaaaggaggaaattttatgagttcaggagatactggttttatcatgctttgttctgcccttgtttttcttatgacacctggccttgctttcttttacggtggactggttcgccgcaaaaatgttgtcaacacaatgatggcctgcgtcagcattatggggctttccattgtaatgtgggtactttttggatattccctttcatttggaggaaaccatgccggaatcatcggtgacttgcgttatttcggatttcagaatgtaggagctgatgcaggtccttatgccgattccattcctcaccttgtatttgctgcatttcagatgatgtttgcggtcatcactccggcactgatcactggagccgttgtcggcagaatgcgttttaaagcgctgtttttattcatcgcattctggtccgtaatcgtatattatccaatggctcacatggtatggggcgaaggcggctttcttgcagctttagggtctgttgattttgccggcggaaatgtcgtacatatcagttccggagtatctgccctgatcctcgcagtttatcttggacgcaggcggggatatgaacacacttcctaccatatccacaacatcccatttgtcgttctgggagcttccctgctctggtttggatggtttggtttcaatgcgggaagcgctttgaaagcagatggactggctgctcacgcattcctgacgtctgccgttgcctctgcctctgccatgctcatctggatgcttatcgattctttaaaaggcaaaaaagtcactctggtcggtgcttctaccggtttggtcgtgggattggttgccatcactcccggtgctggatttgttccgatctggtctgcttttttaatcggagcccttgtcagcccgatctgctattttacagtcgtcctcttaaagcaaaaactgatggtcgatgatgctctggatgcttttggatgtcacggtattggaggaatctggggcggtatcgcaaccggactgtttggaaactcttccatcaactccgctgcaagatgggacggactgttttatggcgattctcatttgtttgctgcacagctgatcagtattgttgtcaccattgctgtagccatatgcggaactttgctctgcatcgctcttgtaagaatctttacaccacttcgtgttcgtgtttctgatgaaatatccggcatggatttttcacagcacggcgaaaatgcatatccgtctttcaacggatttgattcataaagataggggggaccattatgctgatcaaaatcgaagcaattgtaagagaagaaagatttgaacaggtcaaagctgcactgcaggaaatccaggtaaacggagtgaccatttctcaagtcatgggatatggaacgcagagaggatatacagaaattgtccggggaagcgaagtcgatattcttctgcatccaaaaatcaaatttgaagtagtcgtctcttccgaagaatgggaagagaaaacaatttctgcgatccaggaagctgcttataccggagaagttggagatgggaaaattttcagctacgaaattagaaataccgtcaagattcgtaccaatgaaaccggatatgacgcagtacaatcacgggataatctttaatctgccgggaaatcacatttcaccttgtgatttcccggtctttttattccagcatgatccaatttgcacgaaagggacgcattaaattccagtatccgactccatataactcatattcttttgccaattcgatctttgccgcaatacttctcacatcttcaaaccagacttcctgctctcttccctgatttctatacgtaaaatgcgggctttggtccgtctcgtcatactgaattggagcaccgtattccaccgcaagccgtacagcctctacattgccgatcgtctctgcctttgttactcctttttcataaggaagcatccagttatacccatagttcggtatccccatcagaagcttctctgccgggatctgggtcagggcatattctaccacctgacgcactttttcaagcggcgcgactgccatgggcggcccataagaatatccccactcataagtcatcaagaacaaccggtctgcctgttctcccaaacgtgcataatcaattccttcatagagcagacctttctgatccgaagacgtcttcggcgccagcgccaccgacacccgataccccttttcattcatggctgcccgcagttctccaacaaaccgggcatatccttctctgttctgcgcacggacatattcaaaatccacatccactcctacataccctttttcctctacaaccttcagcagattggcgatcacattttcacgtactgcttcttcctccaccagtgtctggatcaactgattgttaaagactccctgtgtaaacggtgtcagaaccaacatgggttctattccgtgtttccatgcaagctgtatcatccacgtctcatcctgcatcggtggaacaagctccccttcaaacgtaaatccatacgaaaatacaagcagctcattgagtgcaggaaacgccatttccaacacatacggttcaataaagggatatgcataacctgtcacgtacaaatcttcacggatttctgcactctcctgaggttttagcaaaagcagtgcctgccccgctgtcagtttcccctcttctcccagctgattatcataaataatcttccagacaggaaccccactttgacgggaaatcgaagataccgtatctcccggtactgtcacataaatcataaaaacacctcctgactatcctatgtcggataaccgggaggtattcgatcaatcagtatttgaaaaactgctgactttttgtaaagtggcatatcataatcttagctaaggaaaaggtaagacagcatatccatcatatcacagcatttatttcaaactgtatgcaaaaatccggaaggatttcccgaacaaatgggttccttcctctataaaataatcatcgcatctccgaagctgaaaaaacgatatcgttcttttactgcctcttcatatgcggccataacatgctcttttcctgccagcgcagacacaagcatgatcagcgtagattccggaaggtggaaatttgtaataagtccgtccaatatcttgaactgatatccaggatagataaaaatctctgtccagccgctgcatggctctaaatgaccattctcatccgctgcagattcgatcgtccggcagcttgtcgttcccacacagatcacacgtccaccctgcgcttttgctttgttgatcttctctgctgcctcagcatccaccatataaaactcggaatgcatatggtgttctgtcacatcctctacctttaccggacgaaatgtgccaagccctacatgaagcgtcactcttgcgatatccacgcctctttcctggatttcctttaaaagctccggcgtaaaatgaagccctgccgtcggtgctgcggccgagccttcgtgagctgcatacaccgtattataacgggttctgtcttccaactgatgggtgatatatggagggagcggcatctgtccaagctgatccaaaatttcctcgaaaattcctttgtactcaaaacggatcagacggtttccctcttctaccacatccacaacctcaccaactaaaagcccgctgccaaaactgatcctggttcccggctttgcttttcttcccggttttaccagagtttcccacacatcattctctcctcgttttaacaaaagcacctctattttggcacccgtgccttctttttccccgatcagacgtgcaggaatcacttttgtatcattgatgaccagacagtctcccggtttcagataatcgagcacatcccggaaaatatgatgctctgttcgccccgtctctttgtccagaaacaacagtctggagccggagcgatcctccagaggatcctgcgcgatcagttcctccggaagatcataataaaaatcacttgttttcaatgatatccctctttctaaacagactcgttcctattttctcagctcaattcccatctcttccagtgcttttaaaatccggttcattgcagaagttacatctgcctcttccagagtcttgtcttttgcacggaatacgatagaatatgcaacagatttaaatccagctttgatctgactaccttcgtacaaatcaaacaatgcataactttccagatatgctccacctttttccttgatcacatcttcgatctgtcccaccaggatttcttttggcactaccatactgatatctcttgtcacagccggatattttgcgatgccggcatattttctttcaaatgttgcatatgggataatctccggcatatccaatactgctacatatgcgcgttccccgattccataggtatcggcaacttccggatggatctcgcccagatatcctactacttttccgtcgtaaatgatatttgcctgacgtcccggatgcagatacggttttcctgcatttggatcgtatgtctctttctcatgcattccgatcttctcaaaaaattcttctacaacacctttcatgctgaagaaatcgccgtctccatacattcccagtgtaaactgcattctttcttccggcagttctgtgattggaagctgtttcgggagataaatatttccaagctcgtaaagtcttacatttttgtttctgcgattatagtttgtcgcaagggatgtgagcattccgtttaaagatgttgttctcatcacactataatcttctcccagtggattcatgatctctactgtttctctcaatttcgaatctgccgggattctcagtttctcaaacaccttcggactttcaaaagaataggtcattccctgactgaaaccacagaattctgcaatatcttttgccacatcttcaattctcagtttgaacgacaattttcctgttgtcgcctctcccttaggaagtgttgtcggaatattatcatatccgaaaaaccgggcaacttcttctgccagatctgcgattctgaacagatcatgacggaatgtcggtgcaatcacttcttttgctgcttcatcatattccagaccgatctttgcaaaatacccaagcatctcttcttcggaaatcgaagtcccaagcatcgcattgatcttatctgcatcaaatggaactcttaccggctctttgactttcccgtaaacatccacagttccgccaaccacttcacctgcacctaactcttccacgagctgacaggctctgtcaatggctgcttttgcattattcggatccagacctttttcaaattttccggaagcatcggtacgaagccccactctcttggaagattttcgaatgttcacaccgtcaaagcatgctgcttcaaaaagcatggtcttgacatcgtctgtgatcatcgaattttctccgcccataataccggcaatacccactgctttctctccgtcacagatcatcaaaacatctttgtccatcgtgcgttcctgaccatccagcgttgtaaatttttctccgtcctgcgctgtttttacaatgatctcatgacctgcgatcgtatccagatcgtatgcatgcatcggctgtccgtactcttccatcacataatttgtgatgtcgaccagattgttgatcggacggattccgacagatgccagtctcctctgcatccactttggtgaaggaccgatcttgatattttttacaactcttgcacagtatctcggacacagttctgcatcttctactgttactttgatataatcgttgacatcttcttcatttcctgtctctgttacgatcggaggaacaaatgctttgtcaaaggtcgccgccgcttctcttgcaattccgatcacactgtagcaatctacacgattggatgtcacttcgtattcaaataccacatcgtttctgccaagcgcttcaattgcactggctccgacttcgacatcttccgggaaaatataaattccgttctccggcgcttccggatacatatcagttgtagaaccaagttcctcgatggaacacatcataccataactttccactccgcggagttttccttttttgattttgattccgcccggcactttttgtcccggctcatgtccgcctgcaacacgtcctccatctaatacaacaggaacttttgctccttcaaatacatttttcgctccggttacgatctgcacagtctcagttcctatatttacctggcatacgaccagcttatctgcatccggatgcttctcaatcttatcgatctgaccaatcacaattttctccagatctgcatccagctgctcataaccctctactttcgttcctgacagtgtcattgcatctgtatattcctgcgctgtcacgtccaaatccgggacatacgctttcaaccatgataaagaagtattcataatcctattcctttctctccaaatatctagaactgtttcaaaaatctgatgtcattttcatacaaaagccgcatgtcatcaatctcatatttcaacaatgcgattcgctccagtccgacaccaaacgcaaatccagaatattcttccggatcaattccgcacatctccaatacatgtggatgcaccattccacatccaaggatctcaatccagccggaacctttacagaatcggcatccttttcctccgcatttgaagcaagtcacatctacctctgcacttggctctgtaaatgggaagtgatgcggtctgaattttgtctttgtctcttctccaaacagttcttttgcaaatacttccagtgttcctttcaaatctgcaaaggaaatatttttatcgatcacaagtccctcaatctggtggaaagacggagagtgggttgcatccacttcatccgaacgaaatactcttcccggagcaatcatacggatcggcagcttcccttgctccatgactctggcctgaaccggagatgtctgtgtacgaagtacgatatctttatttacataaaatgtatcctgttcatcctttgcaggatgtccatccggaatattaagtttctcaaaattgtataaatcatattctacttccggaccttccactacctcatagcccattcctacgaaaatacgctctacttcttccaaggcgatcgtatttggatgtctgtgtcccaccgtattctttttcgatggcaatgtcacatcaataacttcctctttcattttttcttcgcggatcgcagcttccatctttacctttgtctcttctaaaagctcttcgatcgcagctcttgtctcattgaccagctgtccgacttttggacgttcctctggagctacatccttcattccttttaatactgctgtcaattctccctttttcccaaggaattttacacgcacctcgttcagcttttccggcacatctgaagctttgatctgctccagagcctgtgctctgatctgttccagtttttctttcatatgtttctcctttcctttggatccctgtgttttcattttccagaaggctgttgtcttcctgacatcctgtctgcatctctatcgaaggcagacttcatctgataagatataaaaaaaactccatccccaaaagggacgaagtctgtattcgcggtaccaccctaattcccacagtctttctgtgagctcttggtcttgtgtaacgtacaatggacggcatcttctactctgtgggcatttcaaaaatgcagcttacgtgggaatttcgattgctgcctgaaccaaagaaggcttacagccagtggcctcctctctctgctggaaaacagttctctactgtacacgctcatcgcttttcatatcctgattcattttccaaatttaagataaatttactttattatcttaccatagtttctgtgattgtcaagatatttctccaacagcgcattgacttccccgcccagaagaatcacatacatacataaatacagccacagcatgatcagtataatcgtggtcatactcccatacatatccgaaaatccttcaaaaatatccagatagatagaaaaaataaaagatatcagcagccatccacatgcagtaaagactgcgcccggaagttgtctgcgcaaggttgtcttctgatttacccttcggtttggaagaaacttatacaccagatcccagaaaaccgtcaaaaccgccagcgttgcaaccgtccggatcttaataatatattgcatcacggtactccaaaacggtgcatgctcataaatcatagcgctgatgctgttgccaaacacagataaaaccagtgacaacacgatcgcaagaatgaatatcaccgtatacaacgatgcccgcaatctcaaatagacatagttacgagtttctgtattcccataaatacagttcaatcctgccgtcacagacaatacgcctcttccggctgaccatactgccacaaggaccgtaatcggaatcactttcgctgactgtgaaaaatagacctgtgtcacgatcgatcggataaaactctgtactgacgttggaaacacctgctctactgcatcgatcacattggcgtaggtagccggggtaaactgcaccatcgtcagcaacagtaaaataatcgggatcatagagagcacaaaaaaataagccgcctgggccgcatacgctcctgtatgatgagaactcacgattcccagcaccctattcacttttcccgccgcctctctaactcgctttcccatacatttctcctgtctgtcctcaaactttcaaaatcatatcacaaagtctgcatttcgtaaaggtctttcttatgtgataaaataagggaatgaaagccagtatacactagatttcattcccttttatcatctgtagaatccccaaaatgccgttccctgtattttgactcctagcacgcaagctaggtgggcaaccgcatctgcttttctgccttccactgcctaacggaggcctgacatattacagaaatataagaatcccgtttaaagtattgtaggttcaaaataacaaggttgtcgaacatctcaggttttctgctaaacttattatagcctatttacgcaaattttacaacccatactccttttcttttttcatggtatttttttcaaatttgtggtatagtaacattatttatattgaaacgcaaggagaggatacattatgaaaacaacggaattaaaactagtctacttcagtccgacagggacaaccaggagagtcattatggagaccgctcgccagatcgacctcaaatcagtctcttttgacctgactgtacataaagaaaagaaaccggccctgcaatttgacgatacagattttgttctgtttggaattcctgtctattccggcagagttcctgagacatttctttcttattttgaaactctcagagggaacaacactccagctgcgctgatcgcaacttacggctgccgtgcctatgaggatgcattactggaattaaaaacagaagtagaaaaccgcggtttccatgtcatcggtgcagctgcatttccaaccgaacattcgattgtccgttccatcggtctgagccgtccgaacaaagcagatatgaaaacgattggtgagtttggagtagcacttaaccgccggattcgaaatgaagaactttccgacatctcgatccaggtgcccggaaacaccccataccgcaaatataagaaaactccgctgataccaaaggctgatatcagtctgtgtaccgaatgcaaagcctgtgtcaaattatgtcctgccggagcaatctcagcggaagacccgaaaaaaacagacaagaaaaagtgcatttcctgtctgcgctgtgtgcgaagctgcaaacaaaaagctcgtagtgtaagcagtatgaagctttccatggccgctaaaaaattaaataaagtttgtcaaagtgacaaagccgctgacatttttttataaatccagccatgaaaaggagctgctgttttgaggaaaatcctcctcaaaacagcagctctcaatacatgatctgatgattctttcgctgtttaaaaatatttctttttcagcttcatcgtatatactgcaaatatgatcaatgctgccataaaaacaataccacccacggtatctgccatttccatcggctttacataccagtgaatacaatctatgaccccgtatagaatcgaaacaattccgaatcccagaaccgccggcaaggctttctttaaataagcatccttatccttacacattctctctgaataactcttccccagaagaatcgtctcattgatatgtccgtcctttttcatctggaaatatgcatacaggcaataaatcccacaccctactgcaagtatcccaataaatccgaacacactgtccatactatctgcactcattgactaaccctcgatttctaatatttctttgactgtctttttcatctgatctgcatcacactctcttgtatggagaacttttgcatcctgaatctcttttactgcattcggaatctcgacccgagaaagcttctccagttcatctaccatctcaaactcgtctcttcctgcatatgcctcatcaatcgcactcataacactgcctgcaaatttataaggactggctgtagaggcaatcagacattttgtctcatctttgctctcttctctatactttgcacatacgcaggatgcaactgctgtgtgtgtatccatcacatatccggtacgtttatatgtatcccgaatcgcctgcgcagtctgtgcttctgtagcatacccacctataaaatcacccagttttgctttcatctcctctgtgatctcataagcgccaactttcttcaatgcttccatcagttctgcatttttctgtccatcctgaccggaaatggtatagatcagacgctccagattactggagatcagaatatccatagatggagaagatgtcagaacaaattctctgtttttatcataggttcctgtctggaagaaatcaaacagaactttattttcattggatgcacagatcagcttgtcaatcggaactcccatctgttttgcataatatgctgccagaatatttccaaagtttccggtcggaactgtcacgttgatcttctcaccattttcaatttcttcgttctgaagcagttttgcatatgcatatacataatatacaacctgcggtaccaaacgcccgatgttaatagaatttgcggaagagaactgatatcctgcagcatccagttcttttgcaagctcctgatcttcaaaaagtgctttcacaccactttgtgcattgtcaaagtttccatgaattgccacaaccgaagtattggcacctttctgtgttatcatctgcatctcctgcacacggctgaccccgtttttcggataaaatacaataatctttgtcccttctacgtctgcgaatcctgccattgctgcttttccggtatctccggatgtcgctgtcagaatcacgatctcttttgtgacgtgattcttctttgcagatgtcgtcatcaaatgtggaagaatggataatgccatatccttaaatgcgatcgtcgctccgtgaaacagctccagatgatagacatctcccactttcacaagaggcgcgattacttctgtatcaaacttggaatcatatgcactgttgatacagtgctttaattcttcctctgtaaaatcggtcaagaactgtttcatgactgcatatgctgtctcctgataggtcatatttttcagttcttccattgtcacatccagtgtcggaatctgctccggcacgaagagtcctccatcttctgcaagcccttttaagattgcttcagatgctgttacttttttttcagaatttcttgtgcttttgtataacaaattcatatcttcgccctctttttctttcttcacactgttattgccatgcattatatcataagtgttttgttttatcaattttgtttcttaaatacaataaagagaatcgcactcacacccattaaaatcgggtagaacaaattcggaatgatatcaaacggggtcagtcctgtcagagttgctgcagacaataattgtgccccgtatggaatcattccctgccctacagatgtaaatatatccaaaagagatgccgatctctttggatcaatgtcaaactcttcactgatttctttggcgatcggacctgccatcacaattgcgatcgtgttattcgctgtacacagatccacaaacaatgcaagtgctgcaattccaaattctccgccgcgtttgccccggattctgcttttgatcagattcaaaataaactgaatccctccatattcccggacaagtgatacgatacaggcaacgacaatcgaaatcaccgtaatatcatacattcctgtcacaccatctcctacgacattgaagatttttgaaagttcgatacttcccgttgccactcctacgaccaaagacagcgccgttccactgatcagtaccacaaaaacattgatgccgaccagtgcaccgatcagtaccaccagataaggcagcaccttccaaatattatatgtcagttctgtccgaattgtataactgccatctcttgtcagcatccagaaaatcaggatcgtaaggattgctgccggaattacgatcaggaaattcgctttgaacttatctttcatctcgcatccctgcgtctttaccgctgcaatggttgtgtctgagatcatagataaattgtctccaaacatagcgccgcagacaactgcaccaatacagaccgccagtgaaaatcctgttttttcactgatgcctaccgcgatcggagcaagtgctgcaatggttcccatagatgttcccatggaaacagaaataaaacatccgataataaataaccccacgaccgcaatctgcggaggcaatacagacaatcccaggttgactgtactttctacgcctcctgcggcagtcactgcaccggaaaaaccaccggcacataaaaagatcaaactcatcgtgataatattttcatctccgactcctgctgaaatcactttcaacttttctgcaaaactcaatttccgattttgaaaaaaggctgccagaagggcgatcaaaaacgctacgatggctggcattgcataaaaatccccaaacacaattcccattcccaaaaacagaagcaaaaatacccctatcgggagcaaggccactgcccttcctctttcttgtactctcaaatctttttctttcacaaatgttcctctctttctcatttccttctttctttttataaaacccatgagggcgttccaaaacattcctcgattttggaaacgccctcatgttacatcctgttctttcttttcatatccggtcttcatttccgttcttttattttctaccgtctgcatctgacgtccggcaattcatgcctactgcgggcgaacttcgttcgacaaggtatacccatccgggcatcccgtaattcatgcctactgcgggcgaacttcgttcgacaaggtatatttcaccaggccgcctgcggcaatcaatttctgcataaactcaggaaatgcctgcccctgatattgagttccttttgtatggtcataaatgatcccactgtcaaaatctacttctacctcatcacctgcttcaatttcctgcgctgcctgtgggcattcgatgatcggaagcccaatattgatcgcattccgatagaaaatccttgcaaatgtctctgcgatcacacaacttaccccggctgtcttcaaacaaagcggtgcatgttctcgggaagaaccgcagccaaaatttttctttgcaacaatcagatctcccttctgcactttttctgcaaactccggatcaatatctgccatagcatgtgacgccagctcttttgcatcaaaagaattcagatatcttgccggaatgatcacatccgtatctacattatctccatatttaaaaacgtgtccctgtgctctcatgcctcttcacctgctttctccggatttgcaatatatcccgcaatcgcacttgccgctgccacttccggggatgcaagataaatcagcgaatccacatgtcccattctccctacaaaattccggttcgtcgtagatacacagcgctcacctgctgccataactcccatatggcctcccatacaaggtccacagctcggtgtattgactgcacatcccgcatctacaaaaatgtccagcagtccttctttgatacactgtttgtaaatctgctgagttgcaggaatgaccattacccgcacatctgaatgtactgtatgaccttttaaaatggcagctgctcttctcatatcttccattcttccatttgtacaggaaccgatcactacctgatcgatcttaatcggttccatcgcctcgatctcatcaatcgtctttgcatttcccggaaggtgcggaaatgcaactgtaggacgcacttccgaaagatcgatcgttataacctgttcatagtcagcatctttatctgcttcaaaaatctgatattcttttttcgaatgctctgccaaatatgcttttgttgtctcatccacagggaaaattccattctttgcacctgcttcaattgccatattcgccattgtaaagcggtcatccatcgataaatgtgcaattccgtctccggtaaattccatggatttgtacaaagctccatctactccgatcttcccgatgatgtgaatgatgatatcttttccactgacatattttccaggctttcctgtcagtacaaactgaattgctgccggaactttaaaccagatctttccagttgccattcctgttgcgatatccgttgttcccatgccagtcgaaaatgctcccagcgctccatatgtacaagtgtgggaatctgcaccaatgatacactctcctgctgtcaccactccggcctccggaaggattgcatgctccactcctgattttccctgttcaaaataccattttaacccctgttcttttgcaaattcacggattgctttcgaattctccgctgatttaatatccttattcggggtaaagtgatccggtacaaatacaactttttctttatcaaatacccgatccgccatctgtttcaaaatcggcagtgccatcggtcctgtaatatcatttgccattacaatatccaacgttgcctcgatcagctctcctgacttcacagattccaatcccgcatgtgcagccagaatcttttgtgtcattgtcattcccataggaatgtccccctttctgtatgactattttgcctgaataaacccttttgctgtcaaagcttctgcacagagtactgctccgccggctgctcctctgactgtattatgggaaagtcctacaaatttgaaatcaaacatagaatcttctctcaagcgtccaatagaaactcccattccattctcataatctacatccatcttcacctgtggacggttctcctcttccagatactgaatgaactgctttggcgcacttggaagattctcttcctgcggaaatcctttgaatgtcacaagtttttcaatcaactgttctttcgttggcttcttttcaaaattgatgaatacagctgctgtatgtccattcaatacaggtacacgcaggcactggcaggtgatctttggaagctgtgcttttacgatctctccgttttctacttttccaagaactctcagtggctcctgctcactcttttcttcctctccgccaatatatggaatgatattttctaccatttccggccagtctttgaatgtctttccagctccggaaatggcctgataagtcgttgcaacaacctcttttggtccaaattctttccatgccgccagacatggagcatagctctgaatggagcagttcggttttactgcgataaatccacgtgttgttccaagacgttttttctgatccttgatcacatcaaaatgatccgaattaatctccggcaccaccatcggaacatccggtgtccagcgatgtgcactgttgttcgaaacaaccggtgtttcagtctttgcatactcttcctcgattgccttgatttcttcttttgtcatgtccactgcactgaatacaaaatctactgtagatgccacatgttctacatcattgacattcatcactgtcagttttttcacagattccggcattggagttgtcattttccatctgtctccaacagcctcctcatatgtctttcctgcagaacgcggacttgctgccactgttacaacctcaaaccatgggtgattctcaagcaaagagataaatctctgccctaccattcccgttgctcctaaaattccaactcttaatttcttttccatcttctttctgtcctttcttctcgtttttattttaaaacagcaatcaagctattcttcttttaaatatttttcttccagtgtgattgcctgttccatcgcgcttcttcccggtgctccaatcgttgcgcgcatctctacacatgttttcatgctgatcgcatcgtaaatatcttcctcaaatactggtgagattgcctgaaactcttccagactcatatcatccagtgcaatgtttttatcaatacaatataaaacaagctgtcctacaattccatgggcatccctaaacggcacaccatgattgaccagatagtctgccgcatccgttgcatttgtaaagccatttttggcgctgtcttccattctctgcttctgaaatcgcatggttcgaagcattccggtaaataacgcaagacaccccttcgtcgtatcaattgcatcaaataccagttccttatcttcctgcatatccttattatatgcaagcggaattcctttcattgtcgtgagcatagacatcaaagcaccgtaaactcttcctgtctttccccggacaagttctgcaatatccggatttttcttttgtggcataatactgcttccggtactatatgcatcatcaatctctacaaactgatactcgttggaattccagatgatcacttcttcgcaaaagcggctcagatgcatcataattgtagacatcgccgataaaaactctatcagataatctctgtccgatacagaatccatactgtttaatgtaggtccgtcaaatccaagcagctctgccgtatattcccggtccagcggatacgtcgttcctgcaagtgccccggctccaagagggcaataattcatacgctttcgaatatctttcattctaagacgatcccgcttgaacatctcaaaataagcgccaagatgatgggccagtgtcacgggctgcgctttctgaagatgcgtaaatcccggcatatatgtctcaatatgttccttcatcaatttcaagagcacttccaacaactcttttaacagtccgtcaactgcttcaatctcatctcttgtatacaggcgcatatccaatgccacctgatcatttctgcttcttccggtgtgcagtttctttcctgcatcgccgatccggtcgatcagattagcttcgacaaaactgtggatgtcttcatattcatctgtgatcgcaaggattccattttccacgtctgtctgaatgccttttagtccctcaataatgcagtctttttcctcttctgtcaaaatcccctgcttttcgagcatcgtcacatgtgcaatgctgccccgaatatcctgcgcataaaatttttgatcaaacgagatggatgcattaaaattatataccagtttgtctgtttccttagtgaagcgaccgccccataactgtgccattcccctgtctccttttctccgatagtatctttttagattgcaattagtttaacacattaacgtgttatatgtccatagcaaactgtgacagtttccttcctattgtatactgcttctttgtgaaaactcacaaccacagtagtcctgtctgtataatccatattctttggaaagttcaatggagcgtttgtatccatttttctttttaaaatcagactgcagataagtaaccccaaactcttcctgtgccgctaacccgatctcatttagctttgctgcatttttcatgggactgatagaaagtgtcgttgtaaaatatgcataaccacctttttttgccatctgtgccgtttcccgcaatctgagtgcgtaacatttaaaacatctggcaccgccctctttcacatcttccagtccttctgccatccgatagaaacgttctttgtcgtagttccctgccagaaaactgaccggatgtttcaagttcatacgcgagatcagctcctgctgttccagaatccgttttgtatactcgctctccggataaatattcggattataataaaataccgtgatttcaaaatattccgacaaatattctaatacataactgctgcacggtgcacaacagctgtgcagcaaaagtctcggtacttgctgctctttctgaagatttgcgatcgttttatccagttctttctgataatttgttacattcatcatctgtttcctccggattttttcctcttttcatgtttcacaatctattacagtatacgtctttcacggatatctgtaaagaaatcttggttttccgccaataaaaatcacagtttttttactttttcatagactgattatatacttgtcgaatggagtgtctgtatggaaccaattttaacactgaatcatttaagctatgcctatcatacgatggaaggtgaaacaaaagcactgtcagatatttccttttccgtgaaaccgggagaattcgtggcaattgtcggcccatccggatgcggcaagtccacactcctctccctgatcgccggactcctaaaaccggaagagggagaaatcctgctgaatggaaaatccttaaaagaaagtgcaaccaatatcggctatatgctgcagcatgatcatctgtttgaatggagaacgatttatcacaatattctcctcggcctagagatccaacattctctaaccgccgctgccaaaactcatgcccgggaattattaaagacctacggcctggaaaaatttgctgactcacatccctcggaactttctggcggaatgcgccagagagccgctctcatccgcactttaatcctggaaccagatcttttgcttctggatgaaccattttctgctctggattatcagacacgactttccgtaggagatgacatcggacagatcatacgagactccgggcgaactgctgttttagtcacacacgatctctcagaagccgtcagtctcgctgacaccatcctcattctgagcaaacggccggcatctgttgggcgcattgttcctgtttccttttcgctgtcttctgataccccgctcaagcgccgcaacgctccggaatttaagacatatttcaatattttatggaaggagctaaatcaaaatgcctgaactttctacagcacaaaaacattacctggatcttcaaaaacgacatcggcaaattgtccggctttcaagactgctgattttacttttctttctcggactctgggagttcacctcccgcaccgggatcattgactcctttgttttcagcagcccttccaaaatcgtgcgatgcttttggaatatggttctggacaaaagtatttttcagcacctttggagtactctttacgaaaccatcctgagctttcttctggtcaccttctttagtgttctgaccgcagttttcttatggtacagtaaaaaatcatctgaaattctggatccttacctggtcgtactaaacagtcttcccaaatctgcgttggcacctctgctcatcgtctggctcggtgcaaaccagaaaaccatcatcattgccggaatgtccgttgccatctttggaagtatcttaacattgtacaccaatttcacctccattgatgaagaaaaaatcaaattgatctatacactccatggaaccaggcgccatgcactgatgaaagtagtcctccccggttctattcccgccatcatcagtaatatgaaagtcaacatcggactgtgcctggtaggtgtgatcatcggagaatttttagcagccagaaaagggcttggatatctgattatctactccagccaagtctttaaaatggattggttgctgatgtccattgttcttttatgcatcatggcaatggggttatatgcgctcattcactggattgaaaaatggtgtctgaaaatccttttctatttttaattcatctggtacaatttatacatgattcggtttcctattggaaactttctatgtagttttaaaaatgtaaaggagagatgaacaattatgagcagactggaactatccactccaacccaagcacagctcgtagtcgaaggtctgtataaagacctggaacgcaggattgaatccagccctcccggactgtgcccggttgatttatcacgcgcatttctagatctttgtcatgcacagacctgtggaaaatgcgttccttgccgcatcgggctaggacagctgagtcactttattaccgatgttttagacggaaaagccactttagagacgctagaggtaatggaagagctggcacgctccattatgaattctgccgattgtgccattggatatgaagcagcccacatggtttacaaaggtctgatcggataccgggaagattacgaagaacatatccgtcagggacgctgtacctgcacttatcatcagccggttccctgtgtttctctatgtccggcagaagtagatatcccaggatatattgcactggtaggggaaggtcgttatgcggatgccattcgcctgatccgaaaagacaacccattccccacctcctgtggattcatttgtgaacatccatgcgaagctcgatgccgccgcaatatggtcgatgacaggataaacatccggggattaaaacgcgtcgcttctgatttcgccggaaaagttcctgccccgtcatgtgccaaatccaccggaaaacgcattgctatcgtaggcggcggtccttgtggcttaagcagcgcctattatctgcagctgatgggacaccagacaacagtctatgaaatgctcccgcaacttgggggaatgcttcgttatggaattccaaactaccggcttccaaaagaagagttggatcatgatattcaggcaattctggatacgggtgtggaagttcgctgcaatgagagaatcggagatcagatcagcattcagcagcttcgaaaagaatacgatgccgtactgatttccattggtgcgagtacagacaaaaagcttggaattgaaggtgacgtagcagacggcgttatttctgctgtccatttcttacgagatgtcgggcttggaaacaagcctgacttaagcggacaggaagttgctgtgatcggcggtggaaacgtctctatggatgctgtccgtactgcaatccgccttggagccaaaaaagtcagtattgtatatcgacgtcggattgctgatatgactgctctgccggaagaaatcgaaggtgccattgcagaaggggtggaagtccaggttttaaaagcaccttctcgtattgagaccgatccaaacgggcatttaaaaggattatatgtcacaccgcaaatggtcagccagatcaaagacggacgtgccagcatacgtccgaccggggaagaggatctttttatcccttgtacaacattgatcgttgctattggtcaggatatcgaatccagacactttgaacaggctggtttttctgttatgcgaggccgtctgatgtcagaaaaaaatgctggttttgaaaatattccaggtgtattcaccggtggagactgtgcaaccggtccatcttccgtcatccgtgccattgctgcagccaaagttattgcagccaatattgacgaatatctgggatatcaccacatcatcacggcagatgttgacattccaaagcctcgtctggatgaccgtactccatgcggaagagtcaatatgaccgagcgggaagtctgtgagcggatccacgattttgaaggagttgaaaactgtatgacagaacaggaagccaaacaggaggcagaccgctgtctgcgctgtgatcacttcggatttggagtctttaaaggagggcgcaacacattatggtaactcttacaattgatcaaaaacaaatacaggctgcggaaggaacaaccattctggaagctgctcaacaaaatggaattccgattccaagactttgctatttaaaagaactcaatgaaatcggtgcgtgccgtatctgttgcgtagaagtagaaggcaaagaaaaactaatcacttcctgcaacaatcttgtagaaaatggtatggttgtttatacaaacagtccaaaagtccgcatgaatcggcgcaatatgatcgaactgattctttcccagcatgactgccgctgtgcatcctgcgtcagaagcggcaactgttctctgcaaaaaattgccaatgatttaaatgttattgacacaccgtttcacttggacattgaacggatcccgtggaatctgaattttccactaatccgtgattctgcaaagtgtatcaaatgtatgcgctgtatccagatctgcgataaagtacaaagtctgaatgtatgggacgtcgaaagcaccggttcccgtactacagttcatgtatcgcaaaaccgaaaaattgaagaggctgactgctcactctgcggacaatgtattacccactgtcctaccggagctctcagagaacgggatgatacagcaaaagcatggaaagccattgacaatcccaaaaagatcaccgttgtccaggttgcacctgctgttcgtactgcctggggtgaggctcttggtttggacaggcaggaagcaactatgggcaagatcacagatgctttaaaacgtctggggtttgattatgtatttgatacatcgttttccgcagacctgacgatcatggaagaagctcatgaattcattcagcgttttacagcaggagaatgcaaagaacgaccaatgttcacttcctgctgcccaggctgggttcgcttcctcaaatcccagtatccgcatctggtaaaacagctctctacagcaaaatcaccgcagcaaatgttcggagccgctatgaaaacctattttgcaaaatccattgatgcagatccgaatgatatctgtacaatttctattatgccttgcctggccaaaaaaggggagcagaacatggaactcttctatgaagaatatgccggacatgatattgatattgtactgacaacacgagagttaacacgcatgattcgctctgcccacatcgagcccgcaactcttcaggatgttccatgtgacgaactgatgcgtgatgcatccggagcaggtgtgatctttggcgccacaggcggagtcatggaagctgcgctgcggacttcctattttttaatcaccggcaagaacccggatgcagatgccttccaggctgtcagacggacacgcgaagacgaatttaccatgactgctgatatcccgattggtgacctggttatcaaaactgccatcgtcagtggccttggcaacgcccgtcgtctgatcgatcgtatcgaacgagatgaagtgcattatgactttgtggaagtcatggcctgcccgggaggatgtgtcggcggaggtggacagccaatccatgacagtgaagaacttgctctaaccagaagtcagaacctttatttcctggatgcttccaacgaacttcgcttctgccatgaaaatccagatattcaaaagctctatcaagactttatgggagctccgctttcccataaggctcatatgctgttacataccgaccacaatatatgggagatgccaaagagaaaataagaaaaaaatgtaccgagacagtattctctcttctgtctcggtacattttttatttgtttgtccttcgaatccttaccttatactgttgctcttcgcacaaaccatatttctctttaaaatttgcctcatttgatgcaatcgtaacaaatgaagccaaatcttgaaacaaaacatcttctccttttggcacatacccaaacgatctttcatacaaaatttctttgtctaaaatcacccgcttggcatccgaaacagaaactctcaatcgttctcccaattgaaagcctgcctgcacaaattcttcattacgtacagaaacttccgcactcccaaacggatcatatccttgtatcattgctttcacatcaccggtagtgacttctgcatgatggagttcgtgcaatataatttcctccactggatactctggtccgacctcttcatatgtaatctttcctgctgccagttttgccgcacaatacgcgaataagtctctcccgtgaaacacactgacatttttggttttttgatatcgatttgttttctcatcaatttcccggatttcttctactcctatcatatcgtgaagaaatgtcaatgttccattatctggagttaccacataacttccatttttcaattttgccacgcttgcccgtctgctcgttccaacccctggatctaccactgacacaaaaacagtccctgagggccagcatggcaccgtatattgcaggcaatacgatgcttctcgaatctggaacgccggaatctgatgcgtaatatcgtaagtctctaattgcggatcgatcatcttacaaatgccatgcatgcacgctacaagtcctgaatcaattccaaaatcagattgcataacaattgatggtttcatacttctttcctcttctatttttcaatttccattgtccagtctgatcctgccaaaacaccatatttctccgacatattctcacaattaattgcaatctgtatctgaagtgtctcactgaccatgagcaatggctctccaaccgctacatatccaaacgaacgacaaaacggaacattatcctcaaataccggggcttcctttcctctttgcaaaattcgaaccttgacagtatctccatatgcgattccctcctgctcaaacacttctgccggaatattggagcagatcagaccaaaatgataatccgcattgtcaagcattcccgttatacgatttccttccactttatatgggatcaactcatgctccacgatttcttctacaggataggcttcccccacttcctcatacgtgatgattccagccgcaagttttgctgcgcaatatgcaaacaaatctcttccgtgaaaaatgtgacatttttctgtactttttaatcgattgcgctcttcatcaatgacacggacttcctcaattcccacatactgattcacatgcgtcagtgttccattatccggagttactacataacttccatttttcagttttgcaacacacgcacgacgatctgttcctacccctggatctacaacagatacaaatacggttcctgccggccagaaatccaccacataactcaatgctgtagatgcctgataggtatcaaaatttttgatttcatgtgtattatcgaatactctcaattcaggatccaccatcatgcacactccctgcattgtacatacggaaatatcctttgtaaaatctgtctgcattaccactgctgctttctttgtactcattttttaattctcctttccattttctgccactaacatttcaaaccctttggtagaatagggctttcctatccgtttattttccagagcttctctcaggcagttcatcctcttatcctgtaacggtgtaaatgccataacgagacctgcaatcaaaacacagattcccggaataattgtaaacatagcttctatcattcccaatgcctgtggattctgaatagattgagatgcatcaaatccactggacgaaagtaaaactccctgtacagctgcagctgccgcacccccaagttttaacaagaaagaatagtaagacataatgattccatctcgctttttccctctgttaaactcatcataatctaccacatcatacaggaaattaaaaatacacatccaatatgcacatgttccaacgcctaccaggatcacataaatacatcccacgatcacatttggtatccctgtaaatttcacgagcaccatagcaatcccgctaaatgccatgcatcccacgaacactttatttttgctgaataccgcaacgcttttggtcacaaacggaacaaatacaattgatacgattgtcatagcggtaaacatataagatgcctgtgtttctcccattcccatattataagttacataatataacaaactggaattaaacaatgtcatatatacattcgtcataagcgcacacaggattaccagaacatagggcttcattttcatcagactgagaatgttttttagaaaacctctgacattaatattttctgtctcaattacctcttcctcagattcttttcctgccgtaaatttccacatcaggaaaatcgttgaaacagcaattgccgccaccagaattcccactgtaaaccaggatttttcctgacttactcctgcatccaacattttccccacaataaatgtaggtacagaacttgcacaaaaagttcctacataccccaatacctctcgaaatgcagacaacttcactctttcgctgtctacatctgtaatgactgctccaaaggaataaaatggtatgttgaatgctgtgtatgcggtccaaaatacaagtactaaaatcaaatagtaaatattcttgcttgtctgcggcaaatctacattcaaaaacattaatacaattgatgctcccaatggaatcaatgaccgtaaaatccacggtctcctctttccatgcttatttttagaatgatcgatcacatatcctatgattggatctgtaatcgcatcccatacaattgcaaccgaaataattgtacctgcgacagccggacttacacctgcgactgtagtcataaaaaacgaaaaaaatgacagtacaaaattatatgacgcacaatctccaatcgaccctattgtatacccaaaaatatcttttgtttttaacttctttcccatctcacttctcctaaacttttgcaatgccccatcttccatatttttcgaatcccagctcttcaaaaatggaatactgctctttttctggtgaaaaaatacaaggaatttttccctgtctgcgaatttcttcacacagtgtatgcaagatctcttttgcataccctttttttctcatgtcctgtgcgacacaaatccctcccatcatacaagtctgatcggttgtcgctgcactgttcccatgagctatgatctctccttctttttccataataatatggaacccttcttttccacaaattctgttttcaatcatccccttttctgcataaagtgctctcatctccggaaatgtcatcaaaaactcataaattcgttcgatatcttttttctctgctctgcgtatctcccctccttttttttctaacgatttcatgttttgatgtacatacaacgtattatatataatctcccatttccgatccacacatctcataacttgttcaacattttcaccttttcccattactgttgtaatttcagaggttaccagttctgcaatctttttacactctggtttttctataaactctgaaagaatcaggttgttgtaatatctcaaaacaacaccctcacatattccttctttttcctgcatatagacctgttgaaattcatgttcaaatccataacactccagatcagaaagtaaaaatgtatgatatacaggctctgcctttaaatactgcacaattttctccctgtccgcttcactacactgtctgatattcttcccctccttacttgttcaacatgtttaacttgcctaaagtttaccattcaatcaaacgcatgtcaatatgttttaaagtatcttgtctgcaattgtcaaacaagatcacctgtgttaaaataattctgtaacaagtaaggaggtgttcatatgaaaacaaaattacaccatcaaagtattcctgcatatctcgatgtttacaattccctatatacagatatcgtaactggaatttatccccccggcgagcatcttcccggcgaaacatctctagccgaaaaatatggcgtaagtcgaaatacactccggcaggcattggcaattttaaacgaagacggcatgattatcaaatcccaggggaaaggaactgtgattgcgcctcagatcaaacagaacacagatgaaaaaattccgaaccctatgttggcattaagcagacacactgttacagataccgttctttcttataattacgctgctccaacagacattgcccgagacaaactacttctttcttccagcgatgttgtgcttgcctgcaattgtgtttttaaatctcatacaactgtcttgggttattcttttacacaagttccaatgcttttttttaatgaattagaactatccacttcagactcgaactctataaaggaagtaattttagatcgcttatttcaatattcggatcgcatcgacatgacctttaaattgatttatgcaaacgatatggaaattgaacttttaaacgttcctgtgatgactcctttgattctaactgaagcaattcattataataaagccaatgaaccatttgcccgaaataaattttactttcttcctgaacattatcaccttgaattttcttacaagaaataaactccataaaacaagaaagagagcactgctccgcagggaatcattcccgacggagcaacgctctctttctatttcactattcttctttttccaatgcctgtatcaatttttccacatgctcttctttcgtatcccaggaagtcacaatacgcactgcggtatgtgtctcatcaattttttcccagaccgtaaattcaaattcccgttccagcttttccaacagatgatcttccagaatcggaaagatctgattggtctgattctcaacaaacaactcgattttctgacttttcagacatgtacggattttctccgccatccggtttgcatgttctgccagacggtaaaatgctccattttcaaacaacccaagaaactgaatacccagaagccacccttttgccaacattgcgccgttctgtttgatcatataacgaaaatctctgtcaatatccggattcaggatcacaacagcttctccaaacaatgctccgttttttgttccacctatgtaaaatacatcacataattctgcaatatcgctcatactacagtcatttccagagcaggtcagagcacttcccagccttgcaccatctaaaaacaacttcaaatgatatttctgacaaatatcagaaatttctgtaagctcccttttggaataaattgttccaagctctgtagcattcgaaatgtacaccatcgctggttttaccatatgctcatctgtatgtgtaagaactgcctgttcgattgcacaagacgtaagtttcccatcctccgcttccacagcaatgaccttatgcccgctgttttctattgctcccgtctcatgaacattgatatgtcctgttttagccgcgatcactgcctcataaggtctaagtgctgccgcaatcaccgttctgtttgtctgggttcctcctaccagaaaatggatggatgcttctctcatttccatttcctgataaatacattctttcgcttcttcacacaaagaatccaggccatatcctgtatgttgagcatgattttcttcgctcatccgccttaagatttcctcgcatgctccctcactgtaatcattcataaaagaaattctgttgtccatcttctatctctcacactcctaaaacatcgtaatatatccctgtacgaagataaacaatacgatcaaaggcaggatatacgatacatagattcttgaccattttgggaatcggattccctgtccgctgtttgcctcctctgtaaacttcttccatccccatccataccggctggtgcagaacagaagataaatcagacttccaagcggaagcagattgttgcttaccaggaaatcttcaaaatccaaaatattttttcctgctcccaaaggagaaatcccactccatacattaaatccgagaatacatggaacagataaaaccaggattgcgatcagattgcagattacagattttctcctgctgcatcctgtcagttccattgcaaaggtaatgatattttcaaacacagcaatgatcgtggatgctgctgcaaaaaacatgcacaggaagaacaatgttccccagattcttccaccactcatcgcattaaaaatattcggcagcgtaataaagatcaaacttggtccttgcccagggttcaccccaaaagcaaaacatgccgggaaaataatcattcctgcgatcaatgccacacatgtatccagaatcgttacgcaaattgcctctccggtcaatgttcgttttcggtcaatataacttccgaaaatcgcaattgctccgattccaaggctcaatgtgaagaatgactgtcccatagccgcatacactacttcaaatacaccggcttcttttactttgctaaaatccggcagcaggtaaaaacgaattccttctccggcatccggcagcgttgccgaacgcactgccaataagatcatcaggccaagaagtaagagcatcatcacttttgtaatcttctctactcctttttgaagtcccatgctgcagattgcaaaacataacacaacaacaattgccatgcagacaaacatcagccccggtcttgaagtaagatctgcaaattctgcctcaatcccttttgcgtcaagcccctcgaactgtccagccgccatctttccaaaatataagatcatccatccaccgatcgtggtataaaacatcatcagaagataattccctgccattccgaaatatttataccaatgccattttgtacctttgggttccagcttgtcaaacgaaagtgcaatacttgactgacttgcacgtcctaccgaaaactccatcaccatgatcggaagtcccaatatcagtaaaaagaacaaataaatcagtacaaatgccgcccctccatactgcccggtaatatatggaaatctccatacatttccaagaccaatggcacatcctgctgaaatcaggataaatcccagtctcgagccaaatttttctctcttcatttctctcatcctctctcatttattcaacgtttatcttacgtgatgtcgcatttacttgtcaagaaaatccgatgcagtctggcaaaatgcatcttttgcattgacaatcatattaaatgtcatctgcgccatctcttccggtgatttttcttccccttcattgagccatatttttaccagccccagacatccgctcagacaaaatgcataaaaatatttcaaatcttcttttttccccgggaacatcttctccagagtctccctgctgttttctttgataatcttctcgattcggtgaataaaccccatatctccattcggtccactcaaagctttgctgatttccctctcctcatccagcacgcgaaacatatcttctataaaatagaacgcattttcattatccggttcgatcggatgctcctgaattgcccgtttgatctcctgttccatattttcttcaatttcccttaaaagatcttgaatatccttaaaatgaaggtaaaatgtggaacgattgatattcacttcctctaccagttctttgactgtaatctgattcacactcttttctttcattaaggatgcaagacctttttttaactgctttcttgttttgatgactcttctgtctacttttttctccatttaccattccccatttccatgatatgctcatcttttttgtaattctttataatatatccaacctgcaatatctgccagaatccatccaatcggaactgcacaccagataccagacaccccgattttaggaactgctgacaatacatacgccagtacaacacgcgttccaagagaaatcacagtcagtatcacagacattcccggttttctgactgcacgataatatccataaaataaaaataaaagtcctattccgaaatagaatgcgccttcgatccgcagatactgcactcctacagtcaggatttctgtttcacagggctgcacaaaaatcaaaagtaactgctttgcaaagccaaaaacaactgctgagatgatcagacaaaatcccaacacaagtaccactgattttcttgttccttcccgaatacgctccttttttccggctccataattttgtgccacaaacgttgagaatgcatttccaaagtcctggaccggcatatatgcaaaagagtcgattttcactgctgccgcaaacgcagccattactacaggtccaaaactattcaccagcccctgaaccatcaaaattcccagattcataactgactgttgaatacaggttaaaaacgaaaattgaaaaatctcttgaaaagtcccggctgtgattgtaaaactatttctcctgaaacgaaattgagggcatctcacccacgtataaactgcaattccaactcctgcaatccactgagaaataactgtcgcttccgccgctccgccaatccccgcattccgtccaattacaaaccataggtccagaacaatgttcattcccgcgcatacagccaggaaaatcaatggaacaaaagactctcctgccgcccgtaaaagtgatgcaaaatagttatatagaaacgtcgcaagaataccggtaaagatgacttccagataggttttcattcccccatatacctgttgaggcacctgtaagaactccagaatccattctgtattgaagctgaccacaatattcatcagtactgccactgcgccgatcataaaaaaagaagctccgatactttcttttaatttgtcttcatttttttctccataccggatggaaaacaatgcaccgctgcccatacacaatcccaagataatcgaagtcaaaaatgtcatcaatgtataggaagatcccactgctgccagcgcatctgaccccaaaaagcgtcctacgatcaccgtatcggcaatattatatgtctgctgcagcaaattgcctgcgatcaaaggaaatgaaaacagcatcatcttttttgtcacagatccacttgtcaagtctactgacacatcttttccccctttttgcgcatagtttcatcctgaaatttattttaaatcaaatacctcataatggcaaggttttcaatgtatagaatcaaaaaagaacaatttttttgtaaaaaacagttgaatttccatttaaaaagagatataataattaaggttcgtttgattcatcaagcgcctgctggaatagctcagtcggtagagcacttcactcgtaatgaaggggtcgtcggttcaagtccgatttccagcttatgaagtaagaggattgaaagttagacttttgatccttttttattttcagaattttctcaataaaaaacgtacagattatatatatttactccataatctgtacgctatcatatttcctgatcgttcttcatccaaatattctgtctttttactctgcgacgaatggacttgttccaacaatgaatcgatatctactcagcaaaatcatccaataccagttttgctgcgccacagattcccgcatcattaccaagagttgcaagcgcaaatttcacttctttgttcgcaaagaatgcgctctcctggaatggtttttccacatactcaagaagaatctctcccgcttttgatacaccgcctccaattacaaaaacagaaggatcgatcacgactgccaaattagaaagagcccgtcccagatagcttccaaaatcctgcgcaatctccttcgctaccgcatcatctgcttttactgcatcaaacacggattttgcagacaagtcttccacgtttaacagagtctctcttgtctcctgttccagttttctttttgcaagacgcacaattccagtggcagatgcatactgttccagacagccttttcttccacatccgcacgcttccgtctcatgtggattcactctgagatgtccgatttcaccgccggccccatgacttcctgtcaaaattttcccaccgacaataataccgccgccaacgcctgttccaagcgttaccataatcagattcttatatccggctccgccgcctttccacatctcaccaagagctgccacattggcatcatttcctacctcaacttcgaatcctgtcagctcttccagttcttttttgacttctttgtatttccagccaagatttgcactgccaaatacaatgccttcttctgtaaccggtgcaggaacacctacccctactccgatcacatccgaatccgctaaatgatgtgccgcttttttctccccaatggatgctgccacatccggaagaattgcctttccttcttcttctgtatgggtcttaatctcccatttttccagaattgttcctgttgcctcaaacaatcccatctttactgttgttccaccaatatctactccaaaacaatatttcatttttatgctctcctattttctttttgccaaactgttctgaactcgcttatataattcctgagccgcattatagcccatctgtttctgtctgtggtttacggctgcagactctacgatgatcgccagatttcttcccggacgaattggaatgttgtggcataccaccttattgccaaggaattctgtataggtctcttccagaccaagacgatcatattctttctctctgctccagtcttccagtgtgatcaccagatcgatattctgtgtctcgcggacactctgcacaccaaacatagacttcacatccacaatcccgattccgcgaagttcaataaaatgtctcgtaatatccggtgcagaccctacaagcgtatcatcgctgactttgcggatctcaactacatcatccgttaccagacgatgtcctctcttgatcagctccagagctgcttcactctttccaattccactctcacccatgatcagcacaccgacaccatacacgtctaccagtaccccgtggattgaaatacacggcgccaactttacgttcatccaacggatcagttctgccataaaagaggatgtcggtttttctgtcacaaagaccggtgtatctgtctttgtcgccttttccaaaagttcctgatctggttccagtgcacggctgaagatcagacatggtattttatgcgataacagctcatcatacattttgatcttcttatcttcttccagtgtctgcaaatacgtatattctacatatccgatcacctgaacacgatctgaatcaaaatgatcaaaatatccggacagctgcagcgccggtctgttgatatctggcacctgaacacacttctctgccagatctacatctggtgtcaggtttttcaaattcatcttttctacaatttcttttaaacttacgccttgtcccataatgttctccttttctaagcatttcctgtgtacaattatatcacttgtgaaaaaacttgtacacagattctgccgctttttcgttcattgatggaatctgtgcaagttcttccacagaagctgcttttatcgcatccagactcataaaattgcgcatcagcgctttgcgccttgccggcccgattccttcgatatcatccagaatcgaatgtacctgtcccttactcctcagcgaacgatgatactcgattgcaaacctgtgtgcctcatcctgaatccgtgtgatcaggcgaaatgcctctgaattcttgtcaattgcaatctcccgattctgataataaagacctcttgtacgatgaaaatcatcttttaccataccgcagaccggaatgttcaggcgcaactcatccagaacctgcagtgccacattgacctgtccttttcctccatccattaaaatcagatccggaaaactgctgaatccgccgacttccttgttttctttctgttctttgagtccgtgggtgaatcttcttgtaagcacttcccgcatgcttccataatcatctgctccttcgactcctttgatcttaaatttccgataatcattgcgttttggcttgcctcgttcgtaaacaaccatggagcctacggattcaaacccatttgtattcgaaatatcatacgcttccatacgataaatatccggaattccaatcaatttttcaatctccttgactgccccgatcgttcttccttcctctcgtttcaatcgttctttatctttactaagaaccagggctgcattattggcagctaattccaccagcttttccttggttccttttttcggcacacggatattgacttttccaccccgctttacactcagccactctcccagaagcactgcgtcttccacctcttcctgaagcatcaattctccggggataaacggcgttcctgcataatactgcttgataaaactattcaaaatctcgccacaggtttctcctttggagatccgaagataaaaatgatcccgaccgatcagacgccctccacggataaagaacacctggactacagcatcctcctcttgtatcgctgccgcaagaatatccctgtcttctccgctgctgtctgtaattttttgcttctgggctatcttctttacactgccaagcagttcccggtactcaattgctttttcaaacaacagctcttctgaagccttctgcatcttctcctccagatcttttaagatcccgtcaaaatttccattcaaaaagcgaagcacttctgcaatcgcctttgcgtactcctctctggaaatatatccctgacatggcgcatcacactgtttgatgtgatagttcagacaaggccgctcttttccgatatcctttggcaggttgcgattgcagcttcggatatgatacaatttatgaagcagatcaatggtatctctgaccgcctgtccacttgtatatgggccaaaatatcttgctttatctttgagcatctttcgcgccagcatcaccctgggaaactcttcattcaccgtcactttaataaatggatatgtcttatcatccatcagcattgtattgtatttgggatggtgttctttgatcaggttacattccaatacaagcgcttccaattccgaatccgtcacaatatactcaaaccgccggatatgtgtcaccatctgttcaattttcacgcctttgtttctgcttgtctgaaaatactgccgtacccggtttttcaaactaatggcctttcccacataaatgatccggtcccgttcatcatgcataatataaacgcccggttttgccgggagcttttttaattcttcctgtatatcaaaattataattttccatgctttctattataaatggttttaaaaaaaaggacaagaaaatcctgtccttctttccgtatttattcttctgcagtctcaggtacttcctgcggagactcttccactggtttcatggcaattctggcttcttttttcgtttccagttcttcgctctcttcgattccctgtacttgtcttaaaattctcataaattcttttcctgtgatcgtttctttctcaatcaggaattcagaaatttgatccaaagcctctctgttttcacgaagcagacgttttgcctcttcatatgctatcttcagcatctccatcacttctgtatcaatctcagcagctgtcgcttctccgcaattcatcaccgcacgcccatccaaataacggctctgtaccgactcaagaccgatcaaaccgaatttctgagacattccgtactgagtaatcattgccctggcaacttttgttgccttttcaatatcattggatgctccggtcgttaccgtgtcaaacacgacttcttctgccgcacgtcctgccaataacccaaccagcattgcttccagctctttctttgtatttaagaatttctcttcttccggtgtctgcatcacgtaaccaagcgctcccatcgttcttggtacgatcgtaattttctgtaccggttctgcatctttctggagagcacttaccagtgcatgccccacttcatgataagaaacgattctgcgctcctcctcattcatgatgcgatcttttttctcttttcctacaagaacaacttccactgcctcgaacaggtctttctgactgaccacctgtcttccgtgcttcactgctgtaatcgcagcttcattgatcatattggcaagatcagatccaactgcaccggatgttgcaagcgcaatcgcctctaaatctaccgtctcatccatcttcacatctttggaatgtaccttcaaaatatccacacggccttttaaatccggcttatctacaatgattcgtctgtcaaatctgcccggacgcaaaagcgccggatccaaaacctccggacggtttgttgcggccagcaagagcagtcccttgtttgtatcaaatccatccatctctgctaagagctgattcaatgtctgttcacgctcatcattgcttcccatggcattatcacggctcttgccgattgcatcaatctcatcaataaagacaatacacggcgccatctgctgtgcctgtttgaacagatctcgcacacgagatgctccgactcccacatacatctccacaaatgcagaaccggacaatgagaaaaacggtacttttgcctctccggcaaccgcttttgccagcaatgtttttccagttcccggaggtccgaccagaagcgccccctttggaagttttgctccgatcccggtatatttgcccggattgtgcagaaaatctacaacttcctgcagagattcttttgcttcatcttctcctgcaacatcctggaaggtcacgcctgtctgcttttcaacatacactttggcattgctttttccaattcccatcataccgcttccttttgacatccgcttcataacaaaattcatcaaaaggaagatcaggatcaagggcaggattgccgtcagaaatacttcaaatatcaaagaagacatcgtatccggaatatgctgtccatattctacccctgcatcatacaaacgttgtgaaagtgtatcgtctttgacggctccggtaaaataatccggctcccggtcagctcccgctgcccgctgctcgatctgtccgaggatctctgcagttgctgtattctcacctgcattttctttgatcgcatcttttcttgcttcttctgtaagggtgatataaattttggcagaatctatcgtaactttttctacttttttctcatccaccattttcagaaatttatcatagcttatttcctgtgggtcactcccctgcatcaatgagatcaatcccataacaagaaaagccgtcagtagtgttgtcaccagaatgacaccccatccctgacggttgtttttgggattgtttttattatttttcttattctgattgtccattcttctcctcctaaagtccactatccccattataagtacagctttcccataaatcaataaaaacattgtgaaaatattgtaaactcctccctatttatagtatactgtatcagaaaaggggaaaatttttatttttccttccgttacacgtaatacgaataataaattgacagaggattgaaatcatgaaaattggatttgataacgaaaagtatttaaagatgcagtccgaacatatccgggaacgcatcaatcagtttgacaacaaactatatcttgagtttggcggaaagttatttgatgactatcacgcagcccgtgtacttcccggatttgagccagacagcaagctccgcctgttaaaacagctcagtgatcaggcagagatcatcattgtcatcagtgcaaaagatattgaaaagaacaaagtacgtggtgaccttggcatcacttatgactctgacgtactccgcctgatggattcttatcgggacaacggtctttatgtcggcagcgttgtgatcacacaatactctggccaggaaagtgcctctttattccgcaacagactggagaacatgggaatccgtgtataccagcactactgtatcaatggttacccgtctaatattccactgattgtcagtgatgaaggctacggaaaaaatgattatattgaaaccactcgtcctcttgtgatcatcacagcaccgggaccaggcagcggaaagatggccacctgcctgtcccagttatatcatgaacacaaacggggaattcatgcaggatatgcaaaattcgagacattcccaatctggaacctgcctctgaagcaccctgtaaacctggcatacgaagctgccacggctgacctcaatgatgtaaacatgatcgatccgttccatctggaagcctacggaaaaacaacagtcaactacaaccgtgacgttgagattttcccggttctaaatacaatattcgagaaaatttatggtaagagcccttacaaatccccaacagatatgggggttaatatggctggaaattgtatctgtgacgatgccgtctgctgtgaagcatcccgccaggagatcgtacgccgttactatgattctctcaacgcgcttctgaaaggaaacagtccggaagaagaggcgcagaagatcgaactactgatgaatcaggccaatgtgaccatcgaagaccgccgcgtcgtagctgctgcgttaaagcgtgcagaagaaacccacacaccggccgctgccctggaactggatgacggacgcattatcaccggaaagacttccaaccttcttggtgcctctgccgcccttcttctgaatgtgatcaaagagctggccggattaaagcatgagcagcatattatctcaccagaatcgatcgagccgatccagaaactaaaagtagaatatttgaagagcaaaaatcctcgacttcacacagatgaagttctgattgccctctctgcaagtgctgcttctaatccggatgcccgactggcactgcagcagctttctaagttggacggatgtcaggcacatacttctgtcatgttatctgatgtagacatccgaaccttcaaacgtcttggggttcagctgacatgcgaagctgtttatgaaaccggatataattatcactagaatatatgcttctgaaagtcctctccacaccggagaggatttttttcagataagaggaaatctttattgtttcccaaaaaatacttgtatttttttcgaaaaagagagtatactctttttttaatatttttattcatatcaaaaaaggaggatcactatggcagtaaaatatgtatttgtgactggtggagttgtttcaggacttgggaaaggaattaccgccgcatctctgggcagacttttaaaagcccgcggatatacagtaaccatgcagaaatttgacccttatatcaatatcgatccaggaacgatgaatccagtacaacatggagaagtattcgtaacggatgacggagctgaaactgatctggatcttggacattatgaacgttttattgatgaaagtctgacaaaaaattccaatgtcacgaccggaaaaatctactggtccgttttgcagaaagaacgaagaggtgatttcggcggcggaactgttcaggtcattcctcacatcaccaatgagatcaaaagcagattttaccgcaatccttctgcagagcatacagaaatcgcgatcattgaagtcggcggaaccgttggagacattgagagtcagccttttctcgaatctatccgtcagttccagcatgaaaaaggacatgaaaatgtgattttgatccatgtcactttaattccatatttaaaggcttctcaggaaatgaagacaaaacctacacaggccagtgtcaaagaactgcagggaatgggcattcagccggatatcatcgtatgccgttctgaacatcctctggatcaggagatcaaagataaaatttccctgttctgtaatcttccggcaaaccatgttcttcaaaatctggatgtagactatttatatgaagcacctcttgccatggaaaaggaacgtctcgcacaggttgtatgcgaatgtttgcatctggactgcccaaatccagatttaagtgactgggaaaccatggttgacaatttaaggcatcctgtatccagggttcgtatcgcactggtcggaaaatacgtgcagcttcacgatgcttatatcagtgttgtggaagcattaaagcatggaggaatctacagccatacaactgtggagatcaaatggatagacgccgagacagtgactcctgaaaccgccgatgagatttttaaagatgtgaccggaatcttggttcccggcggatttggtcaccgcggtgtgggaggcaagatcgaagccatccgctacgcccgcacacataaaatcccgttcctcggtatctgtctcggcatgcagcttgcaatcgtagaattttcccgcaatgtgatcggctatcacgatgcacacagtctggaattgaatccttctacaacacatcccgtgatccacatcatgcaggatcaaatcggtatcgaagatatcggtggaacacttcgcctgggggcttatccatgcattctggacaaaacatccaaagcatatgaagtctatcagaaagaagaaattcaggagcgacacagacatcgctatgaagtcaacaatgactatcgcgacattcttgccaaaagtggcatgaacctttgcgggctctctcctgacggcaagattgttgaaatgatcgaactcaaggagcatccatggtttattgccacacaggcacatccggaattgaaatcgcggccgaataaaccacatccgctgttcaaaggatttgtagaggcagcagcagaattgtcgaagcagcgtacgctttctaaatagcgcttccactcccgcagtatgaaaaggacgcgaaattgtaattctgatttcgcgtctctttcattttttatgcaaaagcatgattctattccattcagaccatccatcgccagttaaacaagaaaaactgtccagacaaagaaagaaccagataaatcctcggttcttttcttccaaacccttcatttctgcggccatatttcaaccgtacaatgtaagaaaaacaaagccagattccccatccgaacatggttcccagcatattcataagcagatcttctacatctgagacacgtctgttgaaaagctgacagaattcgattccaaatgaaaacccgagtccggtcagagcagttcgaaacaggctttgataatttttccagatcaaaggcaataaaaatccaagcggcataagcatcacgatatttaaaatcatactgagatgaatcccattatgaaagggaactaaattaatttctttttgaaactccatccccgcgtattgaccagcttcccaaattgttccaattccggttgtctccaaaaccagatacacataaaccaaaaaaataccaacccagactatatgaaccatatttgtttttttatgagcaaataggatttgaagcaagatataaatcacgcatggcagcaaaatacaaaatagcggatacaagataaaaatcatgtttttcataagggaaatactcctttcactgtcaatatgttttccaaccgaaaaccttattgatagtgtgacagataaatttaaagatctgaaaaaaagattcttaagcttttctaaacattatcccagatttcaccattttcactgctccccatgcagccagcactcctacaacagctccaccaatcacatcggtcggataatgcactcccacatacaacctggaaagggagatcaaaactgccagtatcacaagcggaatcccccactttctctccagaaatgaatacatagccaatgctgccccaaaagaagcacaggtatgcccggaaggaaacgaaaaatccggctgtggctcgatcaacagcttcaatccctcgaccacctcatagggccggattcttgcaacgatatttttaagcgccacattcgtgatcaaagccccgattgccagcgccatcaacgctgcgatccctgcttttctcgtctttttgggaatcaaaagcaggagccccaacaaaatccagaaccatcctgcatctcccaggtgcgtgattgttttccagattccatccatccaatcttgtctgatatattcctgaatgaacaaaagagcctgcccatcccactgtaaagctgcttccatttacctctccttctaccttacatcctgttcctcaaacaatgcgcctacaatctcttcgtacactttgagtttctccgcttttttgatcttctttgcgtatttctcatactgtgtgaacagcggagccatataaaaccacagctctttcatcttaaaaagcacggttttctccccaaagagaacctcctgatattcctcatatagctcatcgtgaaaggcacggatcctgtctttttgaaccggtacgtcctgtctgatctgcatcaccagtcccggatttttcaaaattcctctgccgatcatcactgtcgttatttccggaaaacgatgtcggatttgttcatactcctctttcgtacaaatatccccattatagcagagtctgttcctgctgtgtttcaccgcatactcaaacacttccaaattgggcgcatgtttgtaaaaatccgtctggattctggggtgaatgatcaattcttccatcggatactgattataaatttccaaaagttcgaaaaactcttccggactttcctttccaatccgtgtcttaatagaaatacggctctgcgtcttttcaaaaatttcttccaaaaacgcccgcaatctgtccggctctgccaaaaaaccggatccccgccccttgctcaccacagttttagacggacatcccaaattcaggttgatctcatcgtatccatattctttcagcttttttgctgtctttataaaatcctctgccgaattggtcaaaatctggggaatcgcgcgcatcccccggttattttccggtaagatatcactcttttcacgtgcacttaatttccctttctgattcggcttgataaacggaataaaatacttgtcaattccaccaaaataatgctcgtacgcttttcgatatacatatccactgattccttccagcggtgcaaaataaaagttttccacagtcttctcctgcctcttgtttattcgctccattatagcatatatttctgaatttggcaccttacaatctacaaaagcggactccgcagagcccgctcaaatctgtcacatcagttttgtgtcttcgagtttttccataaacaattcattcagccgtatgactggctttcgaagcaccagtcccaaaaacagagaagctgcaaggaacagacacatgattcccagttctttccagtacgtgtactgataaaatcctgctacgcattctctcatagccgtcatgctgtgtgcaaatggtaaaaacggataaatctttctgaaaatctccggcgccacttcaatcggaaaggttccacctgatcctgccacctgcataaccaaaagaacaacacatattgccttccccacatctccgaaagaaaccgtaaacgtataaatcatatttacatacacaatactgctcacccagcctgccagaagaaataaaaatgggtgttcacactgaatcctgagaaaatacaaatctcccaggcagatcagtccgctttgaagcagtcccatcacaagaaacagaagatatcttcccaaatatatttgatgaggacgcagtggagccaatgttttcttcaggttttccgaagcagtcactttcatcattgctaccagaataattcccccaacccagatagaaagtgtagaatagaatggagccattgctgaaccataattttcaaccggatataacgctttcttctgcattctcacaggagccgatacaaaactgctgatcacctccggactgcttccaagcactgttttcagcgcttccatatttccgtcctgtgccgcctcctccagtttttgcgccgcctgagatactttggccgaagtctctgacaacagcgcagaagaagtatctaacgttacttttaatttttccagaccggatcctgcatcctgtgccagattttccatattgtctacaccctgatccatactcctaaacaacgcctgaacagtactgctggtatctccaagtgtaccgaacaatgtattgatctgtgttttcacattcttctcataatctgtgcggatccctgcgatctgctgagaactctgctgtaccatctgatccagctgagcttgataattccctgcatccgctgctgtctctgtaatttttgcggcagcttcctgaagtttatcccgcattgcctcctgatgcgcaatggattcgttcagattgcccaggatcggcaaaagcagatccgaagcctgtggaaatgcatctgcaagctgctgtacactgtcccgaaatcccgtatatcggtcgatcaccacttgaacttcggatgctatacttttcagtgctcccgctgctgctccggcatctgtggaaatcgaagcaaacgcactgttgatctgtccggatattgcatcgtaacactggctcccctgtgccagcacctgattgatcccttctgtagtacctgacacagcacctcttaaggaatcgacagaatcgcctgtttcatttaacaaagacaggttgctttcggtatttgcccctgtttgtttcaaaatatctgccgttgcatttagcagctgctgcatggaaactgtcatattagaaaatgctttcactgtaccagatacagagtccagatctgcactgatcttccgaatgttcgacatcaaattttgcgctgctgcctgcactccttcgctgtctgtcacctctgaaattgtttccaaaagatccagaccaacttgtgctgctgtcttgacaaaaatctcatcaatctgctgttgtactgcatttgcacctttatctgtcactttcggcgcaatggcattttctttttcattgaggtaatacaagatatctgagtgtgtcatatcctctgaaaacaagctcatcatatcacggctgaaactctctggtataacgatcgccgcataatattttccagattttacaccttctacagcttcttttttccctgtaaatctccaattcaactggtcattttctctaagacttgaaatcacagtatctccgatattcaatttcagcggcaagacttctccttcatatccttcatctgtattggcaaccgctacctgaatcccattcgtattggaatacggatcccagcttgcagcaatattgaaccacgcatagagagaaggaacaatgcataagccaagcgctacgatcattgcgatggcattttttttgatatgagaaatatcatataaaaaaactcctatgatctttttcatgcctcttcctcctgttctttgcgttttttcaatgtctccagaagttcttcctgagacatcctgctcatctttaatcttcgcttcagactttcatgaatgtattccacacagatcagatacactgcgattacaataatcgatgtgatccacaataccaaaaataccattttggagctgatgctaaacattaagatcaaaaaaatcagaggaatgatcaaaattgctgcaaatccccttcgaattcgctttttataattccgttcaaagcgctccgccttctgatacatctcttcccggaatgcatccttatctgccaacgcgctgaccattgctgtcatacgcattctctcctttgtcatacccccttcttcacagatcattagctctgtctcccgaagcttgtcatcaaacatatgattcagattcagaagccatgggcgtacaaccactccgatcagaagcgcaaacaaaacataaacggacaaatacaatagattttccacataatgaaattgatagattcctgcaattgcttcccgcattgcgttgattccatatgtaaacggcagcagtggatgaagtttctggaaaaataccggcgtcatctcaatcggatacgttcccgcagatcccggaatctgaatgatcacaaggatcacactgagagcttttccgatatgtttaaatgtaatcgacaacgcataaataatattcacatatacaaacgaaataaacagtcctgcaaaaataaatgcaggagcagacttacactgcactcgtaaaatcaccaaatctccgacgcaaatgatcagagactggatcaatcccatcacaacatacaacagccatcttccaaaataagactgtatcgctgtaaacttaggtaccacttcatctttatctgcttccagtttaaaaatcgcgatcaaaacgatgccgcccacccagattgcaagatttgtataaaacggagtcattgcacttccataattttttaccgaataaaaagattctgtttttaacgttaccggcgcggacataaactcagaaattgattttgaatccatccctgtcagattcaaaaagtcctgataagactgcgaatttcgcagtgcatttaaatctgcactgactgtattcaactgatcctggaccttttgaagggccttccccgtactttcaagtgctgttttagaatcgttcaaactggtatttaactggtcaagaactccttttgtctgatccaccagcggatccacaccgcttaatacgccagacagttttccagaaagctgtccgaaagaatccagagatgtattcaatcccggaagtacattctgttcaaaattgcctttgattccacgaagctgctgctgattttcccgaaccagacttccaatctgctgcgctgtatttgctgctgtctgtgccgcatttccaattccggcatttcccgcctgcaaactgtttagaagttcctgatgccgctgattttctgcctgcagctgtgcaatcagatcagatgccggactgcccggtattttgccatccaactgagcgagaagcgcaatgattttttcgttgagctgcattacacggttgacagacgtcatcacactgtctactttgccgcttacagactgaattttctcattcaaactcccaagatctgctcccagagaactgctgatatccgataacatattctctccatctgccagtgttcctgataaagcagacgaaaaatcagaaacactgcttctgcccgcctgaagtgcactacttcccgcatccagtgccgctgccccggaagctgccgctgccttcacctgatccattgcagtctgaacttcctgaattttggcatcactatcctgaaaacctgcctgaaattcagcaagtatctgctgataactttcgatgttatccgatacctttttaatatccgatactacattttcctgcatcacatccagatttcctgctgcacctgcaatggatgttttaaaaatctccgaaacagcttctgatgcagcggatacaaatgcatcattgacctggttctgcaccgcagctgccccgctgtctgtaatctttggagcaatcgcattctttttttcatttaaatagtaaagaaatttcggctgctcaatatttcctgtcaatacgctggtcaaagactcgctaaaattctccggaattacaattgctgcataatactttcctgatttcacaccatccacagcctgtttttctccgacaaatttccatccgagatttttattttctttcaatcgatcaatgacttcatctcctgcattaagagcacctgtcagctcattctccgtcccctgatccagattggccaccgcaattttcaaagatccggtattcccatatggatccatgtttgcagcaatgttaaaccacgcgtacagcgacggcagcaaacatactcctgccacaacaatcatggcaacgggattgcggatcagtcttttcatatcccttttaaaaatctgaaatgcgcgcttcatttttagcctccttaataaacactctgtccataataatttattgtatcataaaaagtgctctgtcggctattgaaaaaagcatgaatttcactcattattcccccctctttttaacaacattctgaccagtttttgtttattattcttttcccccaaatggaaagtactttcctccatccattcgcttcagtaaaaagcatgcaacaactgctgcgatcagctccgctgccggaaaactgatccagattccggccacccccatagcgcgagacagcagataccccaacggaagaatgatcacaagctgacgcaaaagcgaaatgatcaaggaatccacgccccttccaagtgcttcaaacactccggaaaagatcacacccacagaggataccagaaatccgagtgaaatcagcctcagtgcctgtgttcctgccgcaagcaattctgcgtctgcctgaaacattcccaaaatgctctttggaatcgccaaagagagcaccgttccgatcagcatcagaactgccgctgaaatcagactgtagcgaatcgtatcacggactcttttctttaatcccgccccataattataaccgatgatcgggcgcattccctgaacaatcccgtttgccggcatataaataaatgtctgcagtttaaagtaaatcccaagcacagctacatatgtgtccgaaaacgcggaaagaatcccatttaatccccctaccaggatagaaggcatagtcatcatcaatgaagatggaattccaaccgaatagatctgtcggatcaacttccagtcaaagtgcagatatttcggatggatcgtcactcccggattcttccgcagataaacaactatataaagaagaaatgcactgatctgtccaattaccgtggcaatcgccgccccctttactcccagtgcagggaagccgagcaatccgaatatcaagatcggatccaaaataatattgatgatcgcaccaactcccaacaagatcatcgttgtcttcattgccccgatcccctgataaatcttttccatagcaatctgcaacagagaaccaaatgaaaagcaaagaacaacatacgtatactcacatgcctgtgccagtatctcctcattctttgtaaataacccaagaaatggttttgtaatcagaaatccaagaatgataaacaacacacaatggatcgccgtcagcgccatccccatcgtagctgcctcatttgcccgtttttgatccttttttccaagactgatcgacaataccgatgcaattccaactccaattccaactgccacagacagtacgatattttgcagcggaaatgcaagagaaacggctgtcagtgctcctgttcccaaataagaaacataaatactgtcaatgatattgtataaagactgtaccagcatcgataataccattggaagagacatccccatcaacaacggaaatatttccctggtttccattttatttttttccataacatcctccctttctcaaaagaaaaagccatgtgcttctgtttattctgaaacagaaaaaccacatggctttgtacatgacctatttttttggctttgacagcatagcatatctttcccctcctgtcaattgctttttccgggattcaacttgtctctcatttttaattatggtagtataaatctgtatggacatctgaattgtccaacagcatactatagaaagaggggcgtttatgcacacactaaaaaaatttatccattattacggtccgtataaaaccgttttctttctggatctgctctgcgctacgatcatcagtctgattgatctggcatatccgcagattcttcgtacttgtaccaatactctgtttacccaagaaagttctgtcattttgcgtacactgcttccaattgcagcaggacttttgatcatgtatctgctccagactctatgcaaatattatgtcagctatcagggacatatgatgggcgcttacatggaaagagatatgcgtcagcagctttttgatcactatgaaaaactttctttttcctattatgatcagaacaactccggacagatgatgagcaaacttgtctctgacctgtttgatattgcagaatttgcacatcatggaccagagaatctgtttatttccgtgatcaagatcatcggttctttcatctttctcttcctgatcaactggaaactggcaattccgcttctgtttcttgttttctgcatgtttgcattttctatgagtcagaaccgcaggatgcaggctacctttatggaaaacagaaagaagattggagatgtcaactcccgtctgcaggacacactgtccggaatccgcgtcgttcagtcttttgcaaacgaggatgtggaaaaagaaaagttcaaaaaaagcaaccacaattttctcctctccaaagatgacaactacaaatgcatgggcagatttatgggatataacctgtttttccagggtatgatgtacctcgtcacactggtattcggaggctatctgattgcaaaaggagaaatgcaggcaacagatcttgccatgtacgcactgtatatcggcattttcatcagcccgatccagattctggtagaacttaccgaaatgattcagaagggcttctctggattcaaacgtttccttgccgtaatggaaacgaaaccggaaatccaggatgctccagatgccaagccgcttcaagacgttcgcggactggtttccttcgaagacgtctccttccactacagcgatgacgatactctggtattatccaatgtctccttccagattccggccggaaagtccatagcgcttgcaggaccgtcaggaagtggaaaaactacgatctgctcccttttgccgcgcttttatgatgtcagcagcgggcgcattaccatcgatggaaaagatatccgggaacttaccctggaaagtctgcgaaaccagattggaatcgtacaacaggatgtctatttattctgcggtacgatcaaagaaaacattgcctatggaaaaccaaatgcatccatggaggagatcatcgatgctgccagaaaagcaaacattcacgattttattgaaagtcttccggatggttatgatacctttgtcggagaacgtggaacccgtctttccggcggtcaaaagcagcgaatctccattgcccgtgtcttcctgaagaatcctccgatcctgatccttgatgaggccaccagtgcactggacaatgaaagcgaacgctggatccagcagagtctggaagttctcgccaaagaccgtacaaccattaccattgctcatcgtctgtcgacaatccagggtgcagacgagattctggtcattgcagataatggcatcgcagaacgtggtacacacgaagaactgattaaaaaaaatggaatttatgcacattatttaagagcataaaaaaacgtacatcctgcgggacttatttccctctggatgtacgttttttatattaataattttctgcgtgaacttcaaaataactctgtggatgattgcaggtcggacagatttccggtgcttctgttccaactacaatgtggccacagttacggcactcccataccttcacttcactctttgcgaatacggcggccgtttccacattctttaacagtgcacgataacgttcttcatgatgtctctcaatcgctgctaccagacgaaatcttgcagccagctccgtaaatccttcttcctctgctgtttttgcaaatccgtcatacatatctgtccactcgtaattctctccatctgctgcagctgccagattctgtgcagtatcgccgattccctgaagttctttaaaccacatttttgcatgttctttctcattgtttgccgtcttcagaaaaagatctgcaatctgctcatatccttcctttttcgcaacagaagcaaagtatgtatatttatttctcgcctgtgcttctcctgcaaaagcagcctctaagtttttctctgtctgtgttcctgcatatttgttttgtgccatgatgtaaaacctcctcttttgattttagctctatcttaccactattttcggtctgatatcaacttcagctcagaaattccaaaaattcttccgcctgtttttgaagcatcttttcactatcttctgtaagaacaaagcggttttccataaacgcctccattccaagtgtcactcctgtctctgtccctatcattctttctgttcttataaattgcagaagctctcttaatttttcaatcgcacctcctgccgctgacttccctgctgccccactgatcgttaccttctttcctgaaattgcagtttctcccataaaatctcccggtgttaacgggcgagaaagccagtccaaaagatttttcagtactcccgggtaactgaagttatattccggtgtcacaaaccaaattccgtctgcttttttcacttcttctctgactctttccacctgttccggcaccgggaattcaatatcctgattcatatatggaagatcaccatactccagaaaactcacctctgccgctcctttcatcaatgctgctgctttttttgcaaactgtctgttaaatgattcttctctcattgatcctacaatcatcaatactttctttttcatgtttcattactcctgcctttctctaaattttcttaaaatccgaatcagctctttttgatcttcttccggcaaaaattcaaaaattttcccaatatagactgcatgagccggtaacactttctcgattttctttcttccttttttcgtcagagaaatcaaaaaacttcttttatctgctgcatcttccattctgcacacatatccatcccgttccatattgcgaatcaccaccgtcatatttcctgaggttgcaagcatcttttcgataatctctcccacatgtagcggaccatttgtatacaacacatccagtaccccaaactgcatcggcgtcaacccatattccttaattacttttccctccatactctgaagtgttctctccgctctgtgaaagacgatcagcgtatgaagcgccagatgattttcctgtaaagcttttttaatctcatccatctccaatccctataaactacaaatacctattcccctgatctatctttagaatatcactaattagtaataatgtcaaatttttctttatctacatctcctagttttcttgaaatcagtgtggttcccacctgtcccaaaacactctccaactgtaaatatagtaaatgcggtgtcaccaaagacattgctactaccatatggtcatttttgctttctttttcactaattagcaatatatttcaaaataaaaggggctgtaaaaaaagcctctgattaagaaacgccagaaccggcatttgccggaactggcgtttctttgtatgaatcttcccatttctgctcatacatgcaccttttcgtagaaaaaatggtatacttaataagcctcagccaatcacgcttaaattttaagcaaccttcatttgccgctgctttttgttgtgatatttataaagattgaatccgcatgaaatcagtgtaagttcgagaattacatttttctcgcctctccgaaataatcttttatacgatttatcccactttaacacaccaaaagtaccctcggattgaatacttcgattcattcttaaaagagctccatgtatggacgtaagattgttcagaacttcctgatggatagcggttaactcctggttcattcggatggtccgatttttatgtgccctcgggcagcattcctgcttatgaggacacccttcacaggattcgcattcgtacagttcttccgttcttccatatttattatatttcacaggctgtgttctcttgaagagaaatttctgtccgtttggacatatgagattcccatctgcatcttttgtaaaatttacagcacgatatggattttcacgatattttttgtccgtcgtttcttttttatacatggtaaatttcatatatttttccatgccgtgttcttcacagtaaagataattattgtaagaaccgtatcctgcatcggcaaccggatatttcggataatgaccatatgaacgattgaatttttccaccaaaggcacaaaacattccatgtccgatgcataaggttttacatcgattacggcgatgtactcatcgcagatggctgtctgcaggttatacgctgggagcagttggtcatttcccatgtaatcacgtttcagtcgcataaaagtcgcatcctgatcagtttttgaatagctgttcctttcatctccgcagatttctatatgacgcgcataggtttttaaacgttttagatagccttgcagttcctggtattgtttttgctgaatgctttttctgtgtccgcatccggaaacgaacaaattttcatcaagtccggttcctctcttatacatctccaacaattcagaaacgtaattaatcgcatactcttcacgcttttcaagctttagtcccaggtatccaagtacttcctgattcatggcatcaatcaggatagatatcttatcaaaaattttctgacgatttttaatacaagactttttccatacccatgtataacgattggcatttgcttctatttttgtaccatcaatatatgtatgctgcaaatccacatgatcttttgaaaaaatgtaagcatttatgtccatgaatatctgttctatggaatcagtcagttcatttcggataagatttccgaaagtggcaaaagtaggtgctttcatttcgtcgagaagatacatgtaacgaatgtcattgcgacatagtttttcgatttcacgcagcgaacaaatacctttttccataaaagcaaacagtatcactttaagcagtttttgttcatcacatcttgggcgacctgttttgtagcctttctctacaaaatatcttgataggtcgatgtgatccataacctcacaaaaagtgtataccggatcagaaatatcaattaatttttcgatttctaatggtaatttcagctgacgagctgtataattatcattggtattttgatttagtagcataattcattataccaaaaaatcgctcagacttcacggtctgggcgatttttctattagggaagtttttttacagccccttttattttgactcaactttcctgccaattctctggttcttctaattcctgataagaaaagaaatcaaaatctgcatagtgctcgtgtttcatacgatccgcacaggtgattcccacaaacgtccccgtaaattccccatatttgctgtattcatctgaaaaatgtgaaaggtcaaaagtctgcccgatctttcggtagtgctctccatcatatccccagctaaattgaatctttcttcctcgaagcgaaactttcagatagactgccttatcactcactgcaacttttgtatctcccagttcatgtttttctccattttccagccagttaatggaaatcgccggactattcagactttcgctgtaatactttcgcaaattgatgtaattcatattgtcatagtaaagaatcaggcctgcactatgctgatggatttccggatgaaattccatcttggtaatgacatctgcataaaccattgtcagctttctcgcaagaatgctcactttatttaaagaagccctcgattcctgtcctctcatacgaagccatcccggacggcttgccagatcacagaatctctgcggcatgattcttggcgcatagtattggattcccagttcgtccgcatcaaaatcgtcaaaatccggtatcttctgaaccggaaattctggcagactgctctcttccacccattcttttgccagtcttccgcccccttttaaacgaagccatccatctgttgtccactccattctctggatcgcagtttctcttccaagcgtacaacataactccgggcgaaatgggcgggcacaaagatgaaccagccacgtttctcctgtaggtgtttccacataacttccatgtccgcttttctggagatacgattccggattaaaataccgctcttttaaatgatcccaatcttttctctcgtaaaattctcccggagaagatgtcagaatcggattcatcggatcactctcataaggtccaagtacagattttgcccgtcccattgtcacactgtgataatatccggttccgccttctgcacacatgatatagtaatattctcctcttttcgtcagatgtggcgcttcgatgcatcccctgtctgtacctcctgtccaaatcttctgtgggtttccttttatttgctggtttaccggatcatactctaccgcagaaatgtatccaggcttttcataattcgcccgtgtttcccactccagagaaacgatccatttccttccgtcatcatcatgcagaatggatgcatcaaatccagaagaatgcagatagaccggtttactccacggtcctttgatatcttttgcggtgatcaggaagttatctacatcaaaatatcttgcattcatggagttcatgacaccataaatcacataaaacaaatcctctgactcacaataagtcagacatggagcccagattccctttgctgacggcaacttcttcaaatctacttcttcatcatccgtcaacacatgggtatataattcccagttttttaaatcctttgaatgataaactggaatccccggaaaccattcaaaggaagagactgccagataatagtcatcccccttccgacagatacaaggatctgcgtgaaaccctgttaaaatcggattcttgatcatacttatttctgctccttccttctcataatttccctctgttcatccgtcagttgtttttcgatcgtaaaaaagaaaatcagccctgcacaaactgcatatgcgattgtttctatccaaatataactcacagaaatcgccattcgtacactttccgtctgtgctgtaattcccattgaaatttttgctgcctgatcatatccgcaggcatttaacactgcactgaacaaggcattgcagacaggtgttcctgcaaccataatagaactataaatcgacattgtcagtccatctgtacgaattccttttttatattcaatatggtcgatcacatctgacagcaaagcaaggatcatatagcatgcaggtgccgatcccagacattttaatgcaacacccactgcaaccggaacaatcctcccatttcctaaaattgcaatcacgccacctgctgttcccacaaacattcccaccatacagacataacgcttactgaaccgattacacaaaggcactacacagactgccgccaccgccattgggactgctcccataatactcaacagagactgggaagcgccccatgcatctgcagttccaaaaaacgtattgtccaacacccatttacagaaataggtcatcgaaccgtttttcattgctccgctccactgaaatcccaaatagaacaccatcacaatccaccacattttttcgcctgtgattgcttttaactgctctttcatactgatgcttggatgtgtttccgtctgttctgtcccttcctcagtcactctttcttttgtaaatcgaaactgtagatagatcgtaagcgccgcaaaaactgctactgccagcattgccgcaaaccacagtctttgattcgcttttaatgcaaaggagactaaaaccggaaacaccatggatcctactcccataacgcctaaacctgccacgttggtaaatgatgccagtattccccttttcttactgtcccttgtggacaatggaaccagtgttgaatttgccgtattatagatgggataagctactgcatagaacagattgtatgcaattgcgatccatatcatttttgccataccctcaaacggaacaataaacatcagaacacttcccactgacatcgtaaacgcagagagcagaatccacggccttgcttttcctgctgctgttttcgtccgttcaatcaactgtccaacgatcaggttcgctgtcacaatcagaatcgtggatagcagctgcagcgttgtcagaaatactagatttaactttaatacatccgtaaaataattctgcagaatactggtaaatataccagatgagagcaatgctccaaacggcccgaaaaaataaccgaacaccatctctggcatctgaattttttctatttttatccgtgacacaatcaatgaactgttccagaaatctttctttgctttctttttcatatgtttcctctttcagattaggtgaccgattcttatttttagaatctgccacctgaatttatctgcttattcctttacagctaccctttcctgattaaaaaatgctgcaacccctacaagcaacattcctgccaaaaagcaaccaattccggcaaatgcctgatataataatatttttgcaagtgtatttcctgactccagattagatccgagtataatcgccgcagattcgactctttctccgataaacattacagctgtcactgcaaacaaaactcctgccagtggatataacaaactcgtccacttcatatattcccattttctctcacaaaatgcattaactatcactaccaaaataccagcaatcccccacattatcactgttatttgaaaatcatcataatatttcgcagtagcattgatgtaatatagaatcattcctgccacaccacatatcacagctagaaataaaaatacggttcctaatccctgctttttcatatctgtgtttcctccttcttatttttccggtatgctcgaatataaaaaacaattcccagcaatgtaaggattaccattacagcgcctactccaagataaacggctctccaccatgtcattttctggacaacatgagatgtctcgttgattccgttcattgcattggaatttgcaagtgcatagaataaatattttgtattgtctctcactgcctgagtcaatgttgcatccccttgtattccttcttttgtaaaataggaccattccccgtttttccctgcaagactatcagaactgattcccataagtgttgttcctgcgattacagattccttcacagtcatatagttggctttctgcgaaatcaacatatcagtcatcaaaaatccctgatatcccaattcttctcttaaaatattctgcatcaatcctgtgtgtgcactggaataaataatgccgattcggttaaacgcagtcatcatggacaatgcaccaccgtcaatagctccttcaaaccctttcaactctgtctctctagctttctgctctgtcataaacacgctgactcccatacgtccagattcctgatcattgaatgcaaaatgttttgcaactggaagacatccttttgttcttgcacctctgatcactgcttcccctgtataatttgtcagtattggatcttcggaataatattcatcgtttctcgcattgtatggcgttctctgcagattcattgcaggtgcaaagaaaatcgtaatattactccacaaagagtcatttccaaaaagctttccctctgctaacgccaaattcttattgaatgttgaagctacgattgattccgtcaccatatcatttaaccggtagtctgcatttggatcatcactttttacatatgtcgcagaatctggatccgaacttctttctcccaatgtagaataactaaatccggaaggtccatccgattcaaatgcatccacaaccatatcaacagatggataatcctttggctgagaacctccaactctgattccataaatcgcctcttccagactgagttgatccagaagtccatcccatctcgagtcatcaaactcagcctgtttcatctcaaaaaaggacgcaccattttctttttccggaaaaataccactaatatcttctcctgtcttcacatcataaaaatccatcgtaatatattcttgcattgcatcattaatttcaatcccctcataagttttgggccatgttccactccaatcctgacgtgacagatatgtcacagtatctggctgccaataattcagatctgcattgtctaattgattggtaatcttagttccatttgcagacacagaatagtttttcgtgtccatatttttctgtttccacgtatatcctaaggatgcttttcctgctgcgtccattccatcatttactgtatatccctggattgcaagaatattgttcaatgcatcatgagctccatttccaagcgccaaataataatctcctgcatccataatataggtttttgcatttttataatcataacttgcaaattccttcatttcaaatgttgtagtaagcgtctgtttttcccccggatccagcatatcagacttgatataatccacaagctgtactgctgatttttctactaagttctccttgtcatattctgtatatggggtctgaacataaatctgcacaacatcttttccagccacatccccggtattttccaccgttgcagttactgttactgtatgacttttttcatcgatttgaacagaatccagtgtctgttcaaaggatgtataactgattccatatccaaagccatacgaaacttcatttggatatttccatccttcctttgtgctagatccgattttagaggatgcatttccaactttcattacagtatcggcatagcgagtctcataatatttatatcctacgtagattccctctgcctcgaccacataggtatttgcagaatcgccatcaccatttgtatactctatatatccgtaattctgcatcgcaggagaagactgagaatcaacagcataggtgcttgccagatgtccggacggattgcttgttccatttaaaatatctgcaattccatacgttccatagcatcccggaaaaccgatccacaagattgaatcgatttctggattctgtttcaattcttcaatttccacctgactaacagaatttataagaacaataaccttgtcaaaatgctcacacgccagattgatcatatctcgttcttcttcattcaatgccagaacagtggagccgctctcgccttctgcaagtccttttttgcccgcctgataatcgccaccttctgttcccggtcttccaattacaacgatagccgcatcatggtactctttaaaactgtcttgataatctgcgtcggtttctttataaagagacagtggaggttctcctactcggtacccttctgttgccactcctgtaaataagtttactccaatctctcctgggcgataaccatacagatcagaaccatcagcctttttcccagtcacaatatttcccatatcatcataaagctttgtcatcacaggattaacttgaaatccccgatcctgcaacgctgtttccaatgtcaccacctgactagcttcaacagtgccacctacctgaccaccataagacatataatgactgcgggacccaaacaacgtaacacctgtcccttctgaaagaggaagtgtcttattctcatttttcaaaaggacgctgccttcctcacttaacacttcattcagtgatttgtgttcctgaattagctcgtctgtcgaaccataatctgatgtgtatgtatatgttccgtcaatcgttttattttctgtctcaatcgcactgctgattgttccgatattctgatcaatattttctctccatccttcacatatcgttcctgcaccaacagtaactgccagaagagacgctgtaattgttgtcaagcctctccaaattctaaggtttcttttcatgttaacctcctctattttgaaaattattgtaattcaaattgatgaaaatcaaaacttccggttccataaaatgtaaaatacaatgcctgtactccttgtattcctgttatttgagcttcaaatatctgtaattttgggaacggccggatgacaatctctgcaaccggtattcctcccctttcggttgtaaccttcatacatcctgaagcacttcccttccctacaattttaatcttccttgtatcctcaaaagaaaaatatttgaatccagctattgcaccatctctcatattagcaatatactggtctggattcttttccctgtctttccctgtttgtgtaaagtatggatgtactcctttcagccctttaaaagccccgtaaaactttgttccctctttggatgtcaggttgcacgcaatccgtgcttcatatattccttttcctgaaagtggttttccgttgagtccacaggatgtcatctccgcttggtaaaattttccgtttttaaactgaattttttctgcacatgcctgtctggaaaattgtttcctgtttgtctgtctatgataaaatatataatattcatttctgatcttgatcagacttccatgattatttcctgtataatttagtgcattttctttttttctgccctgatatccaatgtcaccattgctgatcagcacaccaccgtactgaaaaccacttacaggattgtcactgaccgcataacacaattcatgacttacataagagctgtatataaaataatactttccatcaaacttccgcatagagcttgcttccagaaattcatgcccttcatagtctgtcccttttccttcttgaatcccttttacaccaatatatctcaaaatctcacttcccggttttaaagtcaacatatcctcttccagctcaaataccatcggaccatgcatggtcggtttctcgccgtgcagcaaaattggattggacaaaagaccaaatccggaatagagataaatgcggccgtcatcatccacaaacactcccggatcaaacattttcggttcatttttctttcccagaggtgttccgtctgcatactttataactccataatattgatattccccagcaggttcttcacagaccgccaccttgatatatccgtctcccataaaataaaacaaataataccttccatccggtccctgacacatatccggagccgcaaatccatactgaattttatttttctttccatttggatctttatctctggaaaaaatcaccccttcgtatctccagtctccaagattatccagagatgccgaccaacatacataatcattcatacagaatgtatatccgtcaaatctgtcatgtgaaccataaagataaattctgtctccccatatatgcggctctccatctggtatatattcataacttggaagatatggattcactgcctgctgtttcatgcttcatcacctttctttctctttagattaaatattcaatccttgatacaatcatatcaatacaccccctttaataaaagagacgaaatcgacaaaaaaagagacgattccgacctatttcggattcatctcttttaactgttttctcttttctttcggggtacaaccgtaaaactctttaaatacacgcattgcaactctgtgattggagcatccattttccagcaatatcgtatttatgggtttttccgtacaaatcagatcttgacatactttggtaacacgatatgcataaagatattccatgattgtcattcctgttcgctttttaaagaatcttgccagataatcttcattgtacccgaatttttctgcaatttccccaactttgatcttatctctgtagttttctttcaggaacgtcataatctcatttaactgctccagatactgactgtctcgattcacatttttctgaactacctttgtagaataagaatgaatcagcgtaaaaagcaaatcgtacaaaaggctattaaattttaacagatatccctccggtctaatgtcataaatcacctgcatatctgtaaaaatcttcttaatcttttccagccttgttttttccacttctgtttctggatgcatattcacttcaaatgtataatcctcaatctccggtatatattttttcaggatttcttttggtatctgcaatacaagtgctcggtttttttctccaagaacactatgtactgtccgggaattgataatattaaactcatcctcttttacaacaacccgtctgttctccagaccgactgtaatcttcccttcgattacatacaccatttcaatactttcatgccaatgaggggtaacataactcccctcatcaaccgacaggtaaaacctgacttctacatccggattccttgatacaatttcatgcctcatctcagctctattcaatcacctgaatccatccttccggcgcctcaatgtgccccatctgaattcctgtcagtgtatcatataatttctggatcgttggtcccatcttttccattccactcgggaaacagatctctgttccatgatctacaatctttccgaccggcgagatgacagctgctgttccgcacaatccgcactctgcgaaatctttcacttcgtccagatatacatctctctcctccacttccagtccaagataatgttctgctacatacaacagagaacgtcttgtgatcgatggaagaatcgtatcggaatgtggtgtcaccactttattgtcttttgtcacaaaaatgaaattcgcaccaccagtttcttctacctttgttcttgttgcagaatccagatacatattctcatcatatccgtttgcatgggctgttacgattgcatgaaggctcattgcatagttaagtcctgctttgatatgtcctgttccatgcggtgcagcacggtcaaaatcagatacacacaatgtcagtggttttactccgcctttgaaatatggtccgaccggcgtcacaaacacgcggaactgatactcatctgcaggcttcactccaatgaccggattgcttccaaatatatatggacgaatgtaaagtgtcgctccggaaccgtatggcggtacatacgccgcattcgcttttaccacttctttgatggcctccaggaaacgctcctctggaaatgcgggcatctccagtcttcttgcagaatccgccattctggatgcattcaaatccgggcggaacacaacgatctttccatcctccgttgtatacgccttcattccttcaaatacagtctgtgcatactgcagaacccctgcgcattcgttgatcatgatattggcatcttctgtcagacaaccatcatcccattttccgtctttataattggaaacataacgcttttcagtctgcacatatccaaatccgagattctcccagtctatttttttcttctccatcaaaaactcctccattcctcaaccgaacatatttgcacttcgttttctgcaattataatactctcactcgcaaaaatcaagagtgcgctctgttttttattattcgtttttggaaaatacagataagaactatcgttccatcatgctgatggattcaattccaacacttccccctcggacaacttcaatacttttgaattcctctttcatcagtttcacgactgcatcatttttagttgccgtctgcacaaactccaaaagcagactatctctgccacaatcgatcacttttcctttgaatgtctctgcgatctgaaataactctactttctcatccagcgtacattttttcactttgatgtaaagaatttctttcatccgtacaaaaatatctgtaaaatcaatcaccttgatcacttctaccatccgattcagctgcttcttgatctgctcgaatgtttcatcatcactgactgttgcgattgtcattcgagacacggtcggatcctctgttgttcctactgtcagactatccaaattgtaggattttcctgaaaacagaccggaaatcttagagagcacgcccacctgattttccacatacagagaaatccatctttttttcatacctttatctgccatcttccgccttcctcctaacaatccataatcatatcttccaatgttccgcccggtttgatcatcggatataccatctcttccggatcaatgataaattcgatcaacgtcggtatctttttgtttttctttgcctcttcaaatgcttccttgacctcttctggtttcgtgacacggattcccttcgctccgtaactttctgccagttttacaaaatccggtgtatactccggaaactctgctccttccgttcttctggaaagagcgcctgcgcgcaaatccgtcattccataacgttttccgtaaaacaacttctgccactgacgtaccatacccagataagtattgttaaatacacatgcgatcaccggagtctcttccagaaccgctgttgcaaattcctgaatattcatctgcataccgccatccccggaaaccgcaatgacctgtttctccggattgccgatctgggcaccaatcgctcccggaaatccatatcccattgttcccagtccaccggacatgacaagctgtttcttctctgtaatctctgcatactgtgataccagcatcatatgctgtcccacatccgtaacaatgattgcatcatcgaactgtcggttcatctcttcaatgatatccaacgggctcagcagtgcatgacgtttcatctgaagtggatgctcttctttccatccctgaatctgggacaaccattttttcgtgtcacattcttctacatattctgtcatcttcgccagtgcttctttcgcatctgctacaatcgggatatccacatggatatttcttgagatcgatgcagtatctatatcaatgtgcacaatctgtgcatgtggtgcaaattcatgcagttttccggtaatccggtcattaaagcgggtaccgattgagaacagaagatcacagccactaaccgccatattagctgcataagcaccatgcattccaagatttccgataaacagcggatgatttgttgcaattgcaccacgccccataatcgttgtcactaccggaacctgtgtattctccactacctctgtaaacaacgcatttgctcttgcaatgtttaccccgcctccggcaagaaacagcgggcgctttgctttgtggagcatcttgattgcttttttcagctgtccgatgtgcacatttgtattcggcttatatccccggatattgacttcttttggatactgtgcgcttccaagttctgccatcacatccttcggaagatcgatcagaaccggacccggtcttccggtcctcgcaatataaaatgcctctttgatgatccgtcccagatcttctctctttgtaacagtcactccatactttgtgatgcttcttgtgattccaacaatgtctacttcctgaaatgcatcattgccgatcagatgtcttgccacctgcccggtaaaacaaacaagagggacactgtcgtaattcgcagttgcaagccctgttaccagattagtcgcccccggtccactggtcaccagacatacccctacctttcctgtagtccttgcataggcatccgcttcatgtaccagtgcctgttcatgtcttggcagaaccactttgatctcattttgcttatacagctcatcactgatgtctatcgtacatgcccccggataaccaaataatacttccacaccctcttcttttaatgcttttactaataacttgtttcctgaaatctgtctcacctgcaacaccctccttatgtaaaacgccccaagctgtccaaaagctcagggcgaataaaattcctcctacactgaatttcagaggctttcgctgctgaaatttatcctcattatacggtgtacttttatctttgtcaattctctattcttgatcttttttaatgcaattttgaatctataactgctttttcttattttttaaaacgccaatcacactgtagactgccaacattgccatattgaccacaacaacgcttgcccctgccggtgttgcatacacataagaaaacgtcactcccagaatcaggcacacaaccgataccattgctgaattcaggattacacctttaaaattcttaaatacccgcatagaagtcagcgccggaaaaataatcagactggaaatcaaaagtgcacccatcatccgcattcccagaacgatcgtcaccgctgtaagtaccgcgattagagtattgtacagatttgctctgactccggttgctttggcaaacgtttcatcgaatgtaatcgcaaaaatcttgttgtaaaaaaacagatataacatcagcactgctacagataacaatatgctaaactgtacatctgccccactcattgcaagaatacttccgaacatatagttgtaaacatcagtgttcattccggtagtcatagaaattaccatgattccgatggctagtgctcctgtggagatcaatgcgattgcagcatcccctttgatcttgctgctgccactgatccgcagaagcaaaacagcagccactacaacaacaggaattgcaactgcaagcggagctgcattcaaagctgctgctactgtcatcgctccaaatcccacatgggaaagcccgtctccgatcatagagtaccgtttcaataccaagctgactccaagaagtgccgaacacagtgccaccagagaaccgactaaaaatgccctcaccataaacggataggacaacatctccataaacatctcaggcatgtccttcacctcccaaaaattttcttcccacagagctctttcgatacgcctctgctgtcccgtaaaacaaagggctctcctgcagatgcagaatatgactcgcatactgcatcgtactttcaatgtcgtgagaaaccatgaccaccgcaatcccggattctttgttgatggttttgatcaactgatagaactctgctgtcaccaaaggatccaaaccggtcaccggttcatccaatagcagcagcttctttgtagcacacagagccctggctaacagtacccgttgtttctgacctcccgaaagatctcggaaacactgatgctccatttcccggatccccagaagatccatattctctctggctgcctttttgtcggatgcactgtaaaacggtctccatccccgactgttaagtcttccagagagtacgacctcatacacacttgcaggaaaatctttctgaaccactgtctgctgcggaaggtatccgatctcgttttgcttcagcccgtcacccagacgaatctgacctttaaacggcgactttaacccgagaaggctttttaccagcgtactttttccggaaccattttctcctacaatgcagagataatctccctgctcaatctgaaacgacagatctcgtacaacagtctgtccctcatatgcgattgaaatttcatcacactgtatcaatgccatcagttcaaagcctcctttaatgtctgtacattctttttcatcatactcagatacgtctctccctgtgcaaattcttttgccgtcagattatggcagctgtaaaaagtcttcacttttgctcctgttgtctcagcaatcgcattggcaatattttcattgctcaactccatttttaaaatcaccggaatatgctcctgctccactttccggatcagaaatgccatggtcgctgcacttggttctgtatccgatgcacaacccggaaatgccgcataatatttcagatcataggcatctgcaaaataccggaacggaaaacgatctccaaaaagcaaaacgtcccgttttgctgtactgaccactgtgcgaaactctttatccagcgcttccagacgatccaggtatgccctttcatttttttcataaatcggcttctgtgccggatccagttccgccaaaactttcgtgatttcttttacaatttccattgcattctccggagaagtccagacatgttcgtccggagtcagcgtcttatgagagccatggtcttcttcctcatgttcatgctcttcttctccgtgatcatgcccccgctcctccttcatgccttccacatactcctcattgaccgtatccacacagtcaatcagacgcaacatgcggaatttctccgtatcgatcgactctaaaatcctttccacccattcatcattctcaccacctacataaataaaaaggtcacaattctgaatcttgagaatgtcccggggcgtcggttcataggaatgtgtctcttctcccggttttaggagcatggaaacctccacctgttcccctgcgatctgacgcacaaaatcatactgtggaaaaatcgttgtcacaacttggattttttcttcctgctcttgtacactgctctcgcttcgacatccggataaactgatcaccaaaagaaaaacggtcagtaaaatgactgctttttttcttctgcatgtcctttgaaatttcatgatatgcctgctttcactatcgacgctcatatgttgcaaatacatactccagatcaaagcatgtgtgctcctcactcacctctgtcatttcccattcttccatctgatccagattcgggaaatacgtatctgcctgatatgcgtgatcaatctttgtcacataaatcttctcacagtaaggaagcatcatacgataaatactctctccgccgatcacaaagatctcttcctcattgtattgtttcagttcttccagtaattcttccggtgtatgcacgattaccgcatctttgacttgataatttttatttcctgtcaatacaatatttatccggttctttaacggaagtccattcggaaaactttccagtgtctttcttcccatgacaactactttattactggtcatctgacgaaaaaacttcatatcggccggaatgctgactaacagtttgtttttatacccgatcgcccagtttttgtctgctgctacgattgcattcattttacgcttcctccttttataccgcaattggaatattcttaatctgtggatgtgtctcatagccttccagtcgtacatcatccggtgtaaattcatagaaatctttcacctctggattgagccagaactttggtgctccgaaaggctcccttttgatcaattcctcgatcatcggaatatgtctgtcataaatatgtgcatctgcgatcacatgtacaaactctccggctttcatatcacatacctgcgccaacatatgaagcagaactgcatactggcagacattccagttattcgctgccaatacatcctgtgaacgctgattcaaaattccatttagtgtcagtttgtcactgtctttttcttttgttacattgaacgtcatgctgtatgcacacggatacagattcatctcgtggagatcctggtgtacataaatatttgtcatgatccgacggctgtatggattattcttcagatcatagatcacacgatccacttgatccatcattccttctttatactgatgctttacctgcatctgatatccatacgcttttccgatggatccctcttcatctgcccaactgtcccagatatgactgttcagctcatgaatattgttggactttttctgccagatccacaacatctcatcaacacaactcttgatccctgtccggcgcagagtcagtgccggaaattctctggaaagatcataacgattcacaacaccaaactttttgatcgtataagccggcgttccatcctcccacaccggacgcaccttttctccttccgtactcgtcccgttatcaataatgtctctgcacatctctataaacacattgtctgcgtaactcactcttctcttctccttctaatattctctgatgatactgctgatttcgaaaatactctccatttcctgcaattctcccagtgcatcctgaatatgatactcttttactttctctgtactgataaccagttctgctgtctcctgctgtacgtgcttttgtacaactctgcggatacttaccttatgatttccaaatacacttgccacttttgctaaaacacccggctcatttttcacctgcatacggaggaaaaacttatttttcacttcatcaaacctcttcaccggaagattctggtagcaagtacagctaattcttccattgcatccaaactgcagatttcttgcaacatcaatcacatctccgaccactgcacttgctgtcggcatctctcctgcgcctcttccataaaacatggcatcgtccactgcatctccatgcacaaatactgcattaaaagaatcccgtacggaagccagcggatggtcttttccgagcaataccggatatacaccaacttcaatcccactttctgtatgatgagcaactgcgagcaatttcacaacgcagtcaaattccttcgcatatgcaatgtcttctgctgtgatttttgtaataccttctgtatatacatctttaaactgtactctggaatgaaatgcaatggaggaaaggattgctgcttttcgccctgcatccagcccttctacatccgctgtcggatctgcctccgcatatcccagttcggttgcttttgcaagcgcagccttaaaatccatattttcttcaaacatcttagtcaaaatatagttcgttgtcccattcacgattcccataacctcggaaatttcatttcccgccagacactgcttcagcgggcgaataatcggaattgcccctgcaaccgatgcttcaaacagcagatcacatccatgtgctgctgccagatccagaagctctcctccatattctgccatcagatccttgttggctgtcaccacatgctttccggcttgcagcgcctcttcgatcattgtttttgccggttcaataccacccatcacttcgatcacgatctggatcccggaatctgttacaatctctttccagtctgttgtcaagagattcgcatccacaccttctctttttttattccggttgtgtaccaggatcttctctacctccagtccggtcccgactgtgtgtaccatgctttctgcccgtttctgaagcagcttgtacacaccacttccaacagttcccaatcccagcaatgccactttgatctttttattctccatactttcacctctgattttgaatccaatcttttttctttgttcatgctacagattcctgtttctatagagtaacaaaatcttttcaaaaagtaaagcggacattcttctgtccgctttacatctgtcactcctcttattgaaatgcaatgccatataattcgcatgcctgtgtaaataacttttctgtattttctgttgcctgagaggtattcagagatacactgcttaccagaatttcccgatcttccatcagctcaacctgcatgatcttagtacacggataagccgccccatctgctccgatctgattacaaagcagctgctgcatcacgaatccatcctctgctatcatctctcctaccgtaatatccgtatagattcctgcctgaccttccagtgtctttcggacattttccaattctgccgaaattctctgttcaatcgtttcattcgcaaccagaagcgtaaattctgctttcagctcaattccgtcctttacggaagttgctgtggactccgtaactgcattttccccatctcgaaacagtgtcacgtccgcagcccattgatatccatccagggatactgtttcaaaatcttcatatccttcaatcggggtgccttcatattctctttgggctccctcctcttctttcacctctggttcttcttcctgggtttccgggacttcttgcggaatcaccgtatcctgtgtctgctgtactgtcgaatctgaaactgtgaacaaccccaatgtgacaaccgctatcacttcaagtatcaaaagaagaattccaatcccgccggctaccgcactggcaatgatcgcgcctgtacttttctccgaatccggaccttcatattccgcttttccaaatgcaaggatcggaaggaacacgatactcaaaaaaatcaatccacaggcaaatccacttttcttgccaaatgcctttgctaatttaatcgatgtaaaaattccaaatatcagatttccaagaggcaggaatgtaaaaataaacagccatcctctcccccatgttatctttgtcatgatatatatattatagaatggtatcagcgatgcccatccatgctctcctgctttgcaaaacactttccacgttaccgcaacccaaaaaatcaaaagtgccaatgctgcgatcagcaccagaatccctgccattgccatatcttttcctcctgttcctcttccttttctcagttgttccaaattcccttgttttcaaaaccaatctgtatttatattttatcacatcaaagtatgaaagtcgatattttaattctccttttgcctactaataatgtgtcatttgaggatataattataacatttgaaattttttaaattttttcaaaaaagttgttgacagacaaaacatcctgtagtatagtatatattgttccgagggaacacaaaacaaacgcgatagtggctcagctggtagagtacgaccttgccaaggtcggggtcgcgggttcgaaccccgtctatcgctcttatgagactgtaaattgaaagatttacagtcttttttcttttccattcttctctttctcctgcggtttccggtgcgatccactgaattgcccttttctctttcaagtcaggattcctcacatatatccgtaagttgttgactgtaataaatcaaatgcaatgcaaaaagagcccttactactcgtgtagttgagagctctctatgattcaaattctatatgcactggctatagtatagcaccatttccccaaaatgcacactttaacttgtttatgttattcttctgttgttacatccaacttcaggccaagttcctccagctgtttacagtcagccatacttggagcctgtgtcatcagacaggaggcatctttgatcttcgggaatgccatcacatcacggatactgtcctcttttgccatcagcatcaccattcgatccaggccatacgcaagtcctgcgtgaggcggcactccgtatttgaatgcatccagaaggaatccaaactgctcgtatgcctgctctttggtaaaaccaagtacctcaaacatcttctcctgcacgtcattctggaagattctgacgcttcctccaccgatttcatttccattcaaaacgatatcgtatgcttttgcacggactctgcccggctcggaatcaatatactgcaggtcttcttccattggcatggtaaatggatggtgcattgccagataacggttctgctcatcactccactcaagcagcgggaattctgtaacccacaggaaattgtactggtttttgtccagaagttccatctgctttgccagttccagacgaagatttcccagaacatcccagactactttgttcttatctgctgcaaagagcagtaaatctcccgcttctccgttcattgctgcgatcagattgttcatctcttcttctgtcataaatttggagaaagaagatttcacggtaccatcttcctgaattgcaatataagcaagtcccttggcaccaaaatcttttgcaaatgccaccagcttgtcaattttcttacgcggcattgctccctgtccttttgcgttgataccgcgaactgttccaccgttctcaacagcccctttgaacacaacaaattcactgtctttcacagtctctgtcacatttaccagttccatgccgaaacgagtatccggtttgtcagaaccgtagcggtccatcgcctcctgccatgtcattctctgaatcggaagctgtacatccacacccagaacttccttaaaaagtttcgcaaggaaacgctcgttgacttcaatcacgtcatctacatccacaaaagaaagctccatatcgatctgggtaaactcaggctgcctgtctgcacgaaggtcctcgtcacggaaacattttgcaatctgaatataacggtcgcatccagagcacatcaaaagctgtttgtaaagctgtggtgactgtggaagtccgtaaaagcttcccggatgtacacggcttggcaccagataatctcttgccccttccggcgtcgtctttccaagaatcggagtctcaatctcaagaaatccttcttcagcaaaaaactgacgtgccagtgttgtcacctgacttctcattcttaaatttctctgaagatccggtcttctcaaatccagatagcgatatttcaaacgaagctcttcctttgtcttactgttttcctctacctggaacggaggcacctcagactctgaaaggatgcgaagttcttctgcacgcacttcaatctctcccgttgccaggttttcattgactgcaccgcttctcttctccacatttcctaccactgcaactacaaactcacttcgtaattttgcagccttttccatcagttctgcctgctcttctccttcaaacacgatctgaaggattccggaacggtcacgcagatccataaatacgattccgcctttatttctgtttttctgcacccagcccataacggttactttctctccaatattagcgctggacagctctccgcatcggtgtgttcttttgagtccctgcatagattctgccatttttgtttctcccttcttttctacaactgccctacactgtcagcatagcagtctacaatctctgtatatccctgctccatcaactgttctttctggaactttttgtttttcttcatattgacgatcatcacctgttttccaagtgcgcgctctgctttcgctgcattcaagattttaagcagactttcctgcggcaactttttatcgatcaggaatgctttcttctgtgcagctgtcggcacctgatatcctctttccaaaagcaacataacgattcgttcaaatccaatggaaaatccgactgcaggagtgttctgtccggtaaattttccgatcatctcgtcgtaacgtccgccgccgcctacagatcccccaaactcgtccatggaaatttcaaaaatcgtccctgtatagtaagacattccgcgaaccagtgtaggatcgaatttcatacggaaatccgcttccttcgtactttccacacttgtaatgatcatctcgagcgaagccgccgcgtcatccgcaagaaagccttccagtttctctttgcagtagcgtacaccttccacgtcattcgtaatctctttgaataactgtaaatatgtttccacagactcttttgcatatccgttttcctctaattccgctgccacaccatccagaccgatcttgtccattttgtccagagtgataaagacattttcataatctttttcttcaaatccgctgtatgctgccattgcttttaaaattcttctgtcattgatgcggatcgtaaaattcttaaagtccagctttccaagcaatgtactggttgccagaatcagctcaatctctgccagattccccggctctccaagaatatcgatatcacactgcataaactgacgaaaacgtcctcgctgtggtctgtctgctctccagacatttcccatctgcagcgctttaaacggagacggcaattcatttgcatgattggaataatatctggacagaggtactgtcagatcataacgcaatcctccatccacgacatccatttcctcttttgcctcttcaattttcagtttttctcctcttttgagaatcttaaaaatcagcttttcattgtctcctccctgtttgctgcagaggttctcaatgtgctccacacatggagtctcaatagatgagaatccaaatgcacggtatgtctctttaatctgtccgatcacataatcgcggatttccatctccgccggcatcatatctttcattccggttaccggtttctttttcagcgccatagccattctccttttctctctatcatctcgtcaatacggctttcatactccgtaatattcttcacattctcaatacggatcaggtttgtttcccgtccgttatccagacgaatcttcccgggaagtaccacttttgtggaagcacctgctcccgccgcaaggattgtctgtttttcttccataataagtatattgtatattccggctttgtcaacctttgcatatccaacattttcaaaatttccggcaatatttttctgccgatacagataatatggaaccattcccatacgctctgccgatttggcactttcctccaccatctgctcaatctcagaatgcagatctatttttctttgttcctgcccaaacttcgccgcccgtttgattgccagcgcatgtactgtcagactgtccggagaaagttcttcgatctgacgaagtgtgtctttcatatcctctgccgtctctcccggaagccctgcgatcaaatccatgttgatgttgtcaaatccaagttctctggcgatataaaaaatattttttacatcctcaacggtatgctttcttcccacaagatccagcgtcttttgctgcatggtctgcggattgacagaaattctggtcaccggaaaacttcgcatcacctccagtttttctcttgtgatgctgtccggtctgcccgcctcgattgtaaattccaacagatgctcaaatgaaaatgacttctgtatcgtatccagaagaaactgcatctgccctgcctccaacgtagtcggagtccctcctccaatgtagatggtattgagttttcttcctcctgcaagttctcccagcgcccggatttcctgacaaagtgcttctaaataatcatccacccggtctttccattcttccaaaggagaagaactgaaggaacaataagaacaaatgctcggacaaaatggaattcctacatagagactgaacccctgttcataatccagtctgccaagcaacgccttttcccgctctgcaatcgcaatgccaagctttgctttctgacggctgactccatattcttcttccagaaacgtgcaggcttcttcctgactcatcccggcctccagcttctgcatcgccaattttgtcggtcttactccagtcagcattccccatgcaagtgtccgtccggttacctttgacagccagtcatagacaagctttgtcacctttttctttccttcctgccgatccgggcagtctgtaatttctgaaacaggaacacaaaagcaagaatcctcttccagcttcactaaaaccagagattcctgcttctcgtccagattctggctgatctcctcatttggaaaataagccttcacaatatgatataaattatacatatataacgtatctttactgctgatctgtatcatcgtatttcgtttccatttttataaaaatggattgttctccttttcaaatccgattgtcgttgcgtccatgtgccccggatacacctgcgtatcctccggaagttccagcaatcgctctttcacagaacgtaccagtgtactcatgctgcctgtcgggaagtctgttctcccgacagaacctgcaaacagtgtatccccgctgaacaaaacaccttcgccttctatataataacagcagccccctgccgtatgtcccggtgtggagatcatgcggatctgatatcctgcaagagtcaggcatgctccgttttccagaagatctgcatccgcaaacgtgtatcccgccccatatgctgtagacagatttacaccggcatctgtcagaacctcctgctccagtatactggcataaaccggaacctgccactcctggcgcagcgcatcaattcccatgatatgatcaaaatgaccatgtgtcagaagaatcccctgaaattctaatccttctgcccgaataaattctgccataggtgcagatggcgctgccggatctatcgcaaaacattcttttgtatgttcattgaagacaatataacaattggtgccaaccattccgatcacaaactttttgattctcatgttcttttaccccgctgtccgttcaatatcaagaacgccttctacattccgcagttttttaatgataagattcagttgttctcttcctctgacaataaatcccatctccagcgtagctgttccttttttgctcgttcttgtgttcatggatttgacatcgattttttcttctgtaaacacttttgtcacatccaaaagcagtccctgacgatcattcgcatacattttcaactctgccagatactgaccgccactttccgtctctgcgttattctcccactctgcatcgatcagccgctctctttctgccgctgataaatgcagcatgttcacgcagtctgtgcggtgaatcgtcatgcctcttcctctggtcacaaatcctacgatctcatctcccggaaccggattgcagcacttggaaaaacgaactgccatatcgtcaattcctttcactacaattccactctttgattttgcaatgtgtaccttctgattatttgcttctgaaatcttctccagaatggtcgcatccgtaatctctttcttatggtcttttccatactcttccaccaaacggttcactacctgaccttcttttagtccaccatgtccgatagctgcaagaaccgcatcccagtcccggaagccatatttgcgctggacaatctgcagatatttcggtttcataatatctgcctgtgtaatggactttgatttgcagtatgtggcgatcagctcttttccgcgtatgatattttcttctttaaactcatgcttaaaccactgattgatcttattctttgcctgtgtactcttcacaatattcagccagtcccggctcggaccttttgaattctgagacgtcagaatctcgatacgatctccgttctgaatcttgtaatcaatattgaccagtttcccgttcacacgggcacctaccatcttattccccactgcactgtgaattgcataagcaaaatccacaggtgtggaaccattcggcaggtttttcacatctccattcggtgtgaaacaatacacatcctctgcaaacaagtccagatcaccctttaacaggcttaaaaattcccggttatctgacatgtcccgctgccactccagaatctgtcgcagccagcttaacttttcttcctcacggctcttattattcttcgccgggccaccgctctctttgtatttccagtgagctgcgataccatactctgcagttttatgcatctcttctgtacgaatctgaatctcaaagggctgtcccgctggtcccatcaaagtcgtatgcaaagactgatacatattcgccttcggcatggcaatataatccttaaatcggcccggaatcggtgtatacatctcgtgaatcactcccagagcagcatagcagtctttgactgagtccacaatgatacgaactgcaaacagatcatacacctgatccagtgttttgttctgattgaccatcttcttataaatactaaagaaatgcttgactcttccgtatactttcgcatgaatgtgcgcattgtccatatgattggaaacttctgccacgatctgctgtacaaattcttccctctcggtctttcgctcattcaaatccttcaccagctgaaaataaacttccggctgataatatttcaaagagagatcgtccagctcggtcttgatcttggaaataccaagtctctgtgcgatcggagcataaatatccatggtttctcttgctttttctttttgttttgcaggaaccataaattccagtgttctcatattatgtaggcggtctgccagtttgatgataataacccgaatatccttcgccatagcgagaaacatcttacgcagattttctgcctgtacttccagcttatcttttgaatacgacaactgtcccagtttcgtaactccatccaccagaagagccacttcttcgccaaactctcttgtaatatcctccacagtcatatcggtgtcttccacagtatcatgaagcatccctgctacgatcgtctccttgtccatctccagatctgccagaataattcccacccagagcggatgaataatataaggctctccagatttgcgaacctgctctttatgtgcttctttggacagtttatacgccttttcaatgagagagatatctgcggacggatgatattttcttacccttgcaatcaatgcttcatacaactgctcagggttttgataatcttcaggtgctttcacggcgtgaccatccaccatttccaaatttttatttagaagttcatattccagtgtacctgccatatcaaatcccccttttcttttatcgtaaaaattccatatggattagtatatcattattattgataatttaccactgtaatctgcacggttttattgcctctatattcattgatcgatgggtaaaatgtcaatgcgactgtctctttttccttcagatactccatgcattcctgaacttctccaaaataaatcgcttccattttccgccctgtttgatccaatacctgaaatttcaggacattctgattttttcctatgatcctgagatcctgcacttttaaattcttttcagcaaacaatggtttcgtatttccttttccaaaaggctccaaaagctccagttcatcaaccagctcttctgttacatacgccaacggaagctgcatatcgatcgacactttggggatgagatcctgctctgtcaattcacagagctcattgatcgttctgcgaaaacgctctatattttcttcctccagagacagacctgccgccagtttgtgaccgccaaactttgtcagcaatgctctgcatttacacatttcttcaaacatatgataactttcgatggaacgcccggaccccttaactccatgttctccctgggtcagaacaaatacgggcctgtaatatttttctttgagtcttccggcaataattcccgcaatactttcatgacaatccggcagatatacaaccaatacccgatcttctttcaaatccgttgtttcaatttgttcaattgccttttccacacctttttccgtcatctctttgcggctgtcattgagtgctttcaaatcttctgccatcattacagcctctcttctgtttttcgcctccaaaagctccaatgcccgttttgcagtgtccaaacgtccgctggcattgatacacggtccgattacaaatccaatgtgatatgcagacagacgctccaccggtatctgtgtgcattccatcagcgctttcagcccttcattttgtgtgcgcttcagcatttcaagaccctgttttacaaagatccggttctcatccaccagatccatcacatcaccgactgtcgcaattgccacattttccatcaaaaaatccacatcatccgcatcctgccccatcacattacacaaagactctacaactttgtatgcaacagctgctccacacaatcctttgaatggataaggatctcccggcaaatgtggattgaccacggcgtcagcacagggaatcagatattctttttctcctcccgcttccagatacgggatttcatgatgatccgttacaatcactgtcaatcctcgttcttttccataagcaatttccgatgttgctgcaatcccattatcacacgtaatgatcgtatctacttcatcctccagtgcccgatcgatcaacatctgattgaggccataaccatccttcattcggtccgggatatccgtatctacaaatgcccccaggctttccaaccccgttttcaaaatataagttgcattcaccccatcaatgtcataatctccgatcacacggattttttttccttcttgaatcttttccgccagaatctccactgccgtatccatatttttcatcagcattccatcatataaatctgcaatggtcccatttaagtagtagtcaatactctgatctcccaaaatatccctgtttcggatcaaacgtgcaacgattggagaaatatgatatttttccgcaatctgcataaaatctgcttttttcatggatacaaaccacttttccatgtccgttcctccccagtatctctctttgtttatcttcctgtttacttttctagtataccataagtcttttccttttccagtaaattcactacaaaaagtgcccctctgcctttctttccggcacggggcacttttcattcaggaatattctgatgatcctattctgttttatctgcgtcttttcaggaatgccagaagcgctgctcctcctgcaagaagtccagatactgccgcacctgctgccgaagttgtatctcctgtttgcactgccttgttcgggctggctgataacggtttctgttcagaagactggctgttgcttccgctgttacttccacttcccggttttgtatctggtttgctatctggtttgctgtctggtttttccgtctgtggtttttcttttaatgcagaaattgcttctcttacctcctgcgctgccgcatcaatgtcttgctgtgaagattttttgtcggccagaacaaactgcgccgcttcaacttttttctgaagttcatttacagtatcttctgtatatttatcagactgctcaagatatttttgtgcctcttttatcactgctgtcaactgagatacatctgttgagttctctgttttctggaaaattgcagtaatatttgcatctgcatttacatcacagaagatgtgttctgctactgctcctacagactgtccattcacaagaacatcactgatcacatatccttcttctgcctggattttaaacgtctgatccgtacctctttctactttcaccgcaccgcttggggtgattgttccgcccacacctgctgctgcagtaatcgtaaactctttctggatcggtgcaatacacatcgctgcagccagagatttctgtgctgcatcaactgcttcctgtgttgccgcctgatctgctgatactgtttttgctgcatccaaaacttctgtcagattctgaatatcttccggggcataatcctgcgcatgtttcagtaattcttcagctgccgcaatagactcattcaattttgttttatcagcctgcacaacttctttttcaatgaagaatacctcaattgacgcatctgcctgaacattttcaaatttaaattctgtaacagctcctacggattctccatttacaagcacttctttcacttcaaatccttcatttggctgaatcgtaaataactgttcttttccctcttctacctgaactgctccacttggatcgatcgttccgccaccatttgcgactgctgtaatcgtaaattctttctgtaccggtggtttttcctgtagattttcaattgcagtccgcacagactctgtcgctgcatcaatctctgcctgtgccgcattgctattatccagtacactctgcgccagctccacagcttctttcaatgctgccactgactcttctgtatagacgtcggattctgccaatttctgtgctgcatctgctaaggctgcttttaatgctgttttatctgcctccggcacctgtggtttttcctccagtcctctagttgcttcttctactgacttcgcggctgcgtccacgctttcctgggttgctttttcatctgccactactttttctgcttctgctactgcctccttcaggactttgacagactcttctgtatacttagcttcttctttcagcgcttcttttgctgtctcgattgctgttttcagtgcatctttgttcactacaaccggcgctttttcttctaccaaagtaatatcaaatttatccaactgcggtgcgttcttttccggtgctgtaaataccagtgttccatcacctgcttcatttactacaaactcgatatcttgtgtgtgtgttgcttttgcctgatctccagctcctattttcacaacttctgtctgagccgcaattttattatcagcctcagaccaagtcaatccattatttgtatcaccgctgcggaactgtacagttgctttatatttccccggtttttctgcatgatagtgtaaagtaatctgatcaccactattcattgcatttacaaagtatccattgcttgcccaatcggcatctttgacttgcagtttccacgtttcatcatctgcgcctgtatttttcaattcaaaatgctctgcctctgctgttgacgtcgccccgttaagttccgtcgggaaattaaaacgattttcttgagtgtaagctgccggagcgaattttgcaacgattgtcgcatctttcttcacatcttttaatgtatgcgatgtaactgcacctacagactcaccatctaccagaacatctgccactttatgtgtcgcatctggtgtaatcttaaattctacagtttcaccttctgttacttttgttgctccatttggtgtaattgtaccgccttccccttcaacggatgcattgaccgtaaactcagccaatttcacatcttttggtgtaatttcaaacttatctaactgtggtgctttcgcatcgcccttcaatgtcagcacaccgcttcctgctttaataaccgtaatgtcaaattctgctgtctttgtcacattcgaatctttgtttcctgctgatacagatcccgtctgaatatttccagcatcatcactccaagagaatttatttgtctctgaaccgcttctataagttactactgcatgataaattcccggtttttctacatgataaggaattgtaattgtatcctcattttccaaagaattcacaaattttttattgcttgcccaatctgcatctgatacttttaatggccatttttcattctcacccgtattatgtaattctgcaaactcagcctccaatgtagcactggaattctttctccatgggaatgcaaacggatcttccgctgtgtatttttcacgctttactaatccctcttttgcttttttcagagctacttctgcttcatttctcttttccggagttgcatttttatcttctaaaacaacctttgcctgtttcagagctgacgcaaattcatcccatccagaaataaaccagtctttctgataagcttcacattcctttacaagtgcagccaatgcaccttcactgctttccatatctttgatggtaattttagctttcttgttaaatccaagaattgctccttcactgacatctgtaatttcagctgagaaatattgatccccggttttatttgtgtttcgtcttgttttaacatctgctgttgtttctgtctgattttcacccaatacaatatccggaattaaggttgtatcgtaatcatcctgaatcgcggtgcctggatttggctgtaattttgcccgtatttctcctttcgttccaccaacgcgttttacttttagagcttttgtttcctcttcattcatggtgtatgcatctgattctagctcgatcattccttttccaccattattgatcactgcagccgcttcaattcctgccgcttttccagtaaccttcagcttaatcgtatggtctccatcttccagatccggagtctcaaaccagcgttgtcccactgcgcgttttgatgcttttgtatccactgttacagtatctccatcatcaactgtgatttctaccgttccatgacccggatctacagttccaaaaagatatgcttttgtcccatggaatttcaattccaattcagcacctgcatttgcccatgtatttgtaccattaatatactgcggctgattttctggattccactttcctttgaatgtaaatccctttccgtctgccacatccttatcttccacatcaatgacttccattccttttggaatcggatttggtttttccatatcaggagtcgatttatatactcccacttcactgatcattggtacttttccgtctgctgtatctactgtaattttaatctggcgtgccgttgtttcgttcgttctgcaaagacgtttcgcaccaattgtcttaccttcttccaacaaagtccatgctccactatctccattacgatattctactttataatgattgattctctgaccgttctgaattgcctcttcaatcgatacaatatcaaactttgtctcttttcccaaatcgatcaaaatttcaccggattttttaccatcacttgtagcccaatatgtcgcatcattgtcatcgatcatattgcccggtttatattctttcgcattgcctcgaacttcagaaacctttacagaagccccctccgctttcgccagattggtttcaaatgtttctttgatattatttccaaattctgtcacgcgatcaagaattgctttgtcaacggtcccctggttgttcggcggtacattcagcaacaaggtcgcattgtgtccaactgagttgaaatacatattgctcaactcttccatactctttggagtatttttcttagttccccagaaccatccagaagtgatgcgggcatctgcctccggaactgtccattgatttccatcttcaaaaccaactgtagcatttccctgtttgttactgttgatcttatttgtctctttgtctacctttgatttagaccatgtatcttttccagcgattcccaattcatttccgatccatcgaaccgttgtgtatgcttctgccccaaacagcatacagtctgcatcccgtccttctacgccttttccttcatatttttgaattgtatcaaaccatttctggaaattatactcttgtgcattggctccacttcctttggccccatccatccacacttctacgaatttcccaccatttccatacttgtcattactcaaaatttctattaactggttgttataaaattcattataatctttcttatcattttctggcgttgttggatttccatgttcatctttatacccataactcggctcatggatatcccacggagacaaatacaatcccatatccatattttgttctgtacacgctttggaaatttctgccaaaatatcggactctccatttttatccttataaccggcttcttttacatcatacgtcgtatattcgctatcccaaatacaaaatccatcgtgatgttttgccgtcacaatcaattttttaaatcccgcatcttttaatgtctttaccagtgtctccgcatcaaaatcctgctttaacgtaaaaatctcacttggttttttatttccgtagtgttctccccattcaatctcattgaatgtattcggtccaaagtgacaaaatgccgccagttcctctttctgataacgaaattgattggcatctggcactacactatccggtgctggtgcttcggctgttccatttaaaccttcatctccaacccaatttgttgtttctgctgcccgaagtgtaacagattcccccatgaaccctgtcgttgtcacaactcctgcaagcagcattgacatccactttttgtacaaagcttttttcttcaccgtctttctcctttctgacataccacgtttatcaaatatatacgcattatacatactcaaatttgtttcatcaatttacttttttacaattttaggttaaaatcttactgttttttgttgtttttgtataattttaaacaatcgttcaaaaaaagcccttgcagttatgtttattttaaacataacccaagggctttttcttttattttccgttattttttctttttcgtcgtttttactttatccggttccgctttttttacaatttttgttttcatcacataccacaaagcacctgtaatacatacagaagaatatgctccacagacaatacccaccatcagtggaagcgcaaattctttgatcgaacttacacccataacaaacagtactgccaccattacaaatgttgtcaatgatgtgtaaatacttcttgtcagagttcttgtaatacatctgttcaccagagtatccagttcctcgcctcgtttctttgtcttaagctcttcacggatacggtcaaagataacgatcgttgcattgatcgaatatcccacaatcgtcagcatacatgcaataaatgtatttcctacagaaattcttgcgattacatagaatgccaatactaccaacacatcatgcagcagtgcaattaccgcactggtagcaaaccggatatccttaaatcgaagccagatataaagcagcatacatgcagttgcgacaagcactgcaatgatggcatctgcccgcatctctgaacttactgtggaactgatgttttctgtcgtgatgttcttctcttctacgccaaattcatctgccatgtattttgcaaaagcttctcgtttttccagatccaaagtctgtgtcttaaagataacctgattgctgtttgcaactgtctgtacctgaatattcggatcatcagtcactttctccagatccggtatcattgtttcatcgatttcttttaatgtatacgttttatcaaatgttacatttgtagaagtaccgcctttaaactccagactgtaattaagcgcaccttttcctcttccggcattcacacccataaacacaaaaccaataacgatcacggccacagatactgcaaagaaaatcttgcgttttccgaggaaatcaattggcgcatgttcttctttgattcttccgtatacctttggattgtgaattccgactgcgtagaatgcataaatgatcatgcgggtgatcacaagtgccgtaaacatagacactacgataccaagtgccagtgtctgcgcaaatccttttaccgtaccgcttcctttcagccagagtactgccgctgcgatcagcgttgtgatatttccgtccaagattgcggacattgctttatggaatccggcatttaatgcggatttcacagattttccagatgccagctcttctttcacacgtgcaaagataattacattggcatccaccgccataccaataccaaggataataccagcaataccaggcagtgtcagtgtaatatcaaatgcattgagtaataccagaataagtcctgtataaatgatcagagccagactggatgcaagtcctggaagcagatacactacgcacatgaacacaaatacaatcgcaagtccgatcgcacctgccgtcagactggtactgattgcttcttcaccaagctgtgctcctacgacgtttgatcgaagctcttctaactctacactcagtccaccaatacgaattgtagatgccaactgctctgcttcttcatattccatggatccttcaatgattgcctgaccatctgtgatttctgcatttacacttggaacactgattaattcgccatcataatagattgcgattgtttcccctgcttcttttgcaactttggttgctgctgcaaatttttcagtaccttcttttgtcatagaaagctctacaacatttttgctggcacctgttgtctgatcctgataggttcccgcttttgcagttttgacatccgtaccatacaaaacaatggagccttcttctttcagttcatcaatgctctttgccaatgcatactttcctgaagtatccagaccataatttgcatttccatcctcatctttttccctgatgaaatacagggatcctggctgtccaagctcactcaaaatctcatttgcatctgtgacacccgggatttcaatgctgatccggtcatccccttcctgataaaccgtagcttctgtactgtactgttccacacgcttctgcaatttgtagatcgtatcactcatatcttctgcagaaggagtctctcctttgactttatacgtaatgctgactccaccttccaggtcaagtccaagtttgatattctttgctgctcctgtctgtccttttccgaatccgaccactgttgtaaatccaagcagtacgatcaatgcagcggtcagaatcagactgataatgcctttactcttcttcattttctaccatcctctctcgatcagccaatgccgctttgatcataattgcgcattccacgcgcttgcgctccatctcgcagctcacttcatatgtatcgttgatcgtatgatggaatttataggaatttgccatacagcccccgctgcaataaaatcttgcgaaacaattacggcagctttctttggaatatacactgcatcctctaaactcttctgcaatctccggttttgtaattccttcctctacgtttcccatcaggaactcctcctgccccacaaactgatgacatggatacaaatccccccatggagttactgccagatattccgttccagatccacacccggacaaacgttttgccacacacgggccaccttccagatccagcataaagtggaagaatgtaaatcctcttccttcccgttctctgtctaccatgatttttgccaacttatcatattctgcaaaaatctgaggaagatcctctttctggatcgcgtatggatccgtatcttctcccacaaccggttcaatggaaatctgctcaaatccaagatctgcgaaatgcagaacatcttctgaaaagtccagattctcccttgtaaaagttcctctgatgtaatatttttcctgatttctgctgtctgccagcttctggaatttcggaacgatcagatcataacttccctttccattgcggaatggacgcattctgtcgttgacttcctttcttccatccagactaagtaccacattatccatctctttatttacaaactcctgcacttcatcattgagcagaaccccatttgttgtcaatgtaaaacggaaatgcttatcatttgtcttctcaagctctcttccgtaagcaaccagttcttttactacctgccagttcatcagcggctctccgccaaagaaatccacttccagatttcttctctttcctgaattggctaccagaaaatcaagtgctttctttccaacctcggcagacatcagtgcacgacgtccatggtattccccttcttctgcaaaacaatatctgcaggccagattacaatcgtgagcaatatgaaggcaaagagctttcactacagtctttctctcttttacctctccgatataatcctcataaatatcctgtgtaaataactgtcctgcctctgtcagctctgcaactgcctccagaacatctcttaaatcttcctccggatacgtatctccaagtttttcaatcagatccgctgctgttttctcttcttttaatgtttcggaagtgtgcgcaggattcatctcttccagacattcgatcacgtcatacgcaatcttgtccacaacatgtacagatccactgttcacatccaggacaatattatacccgttgttttgatactggtgaatcacaacagatacctctctttcatttaaattttatattttcataacacacgtaaggcagcgacctcggccgctgccctcgtatgtcatattcagttttttattttttgtgttcgcaaacctgatttcctactgtacaggatgtcttgcatgctgactggcaagatgtctggcattctccgcatccgccttttttcactgtatggttcaaagtctgagtatttaatgttttgatatgtttcattttctattcctcctaatgtgtatgcataagcatctagtttctttgaattataacacatcctgattgctttttaaagtgtttttttcacaacgtttttctcacgaaatcattccgccgatcattccacctcctgtacaaagcacacacacgatcaaaagttgggagatcgactcctgaatgccatgataaattccaaaagaaatcagcacaagaagcagaaaatacaacactccaatcccaagtccccacatgaacttccgaactttcgccatttttcctgccacaaaacctcccacaagtgtggacaagaggtacaccgtcaaaatccctgccgaaatatgtttttcctccagattgcatttgtaaagcagcactgtcaaaagcagaagtagcacacctgttacaagatatgcacacaacaaagatttcaaaatccatactccccttttctgcactgcattttccgcattcattttcttttccatacacgctctcctccccgtctcttttccggctaatacactgtatgaattcagaaagcgttttataccgtgcttttattgttccatctgccttcctaaaaattctgctgttgcagctgctattttttcttccacttcactgaattttttacccattgctttctgcagaaatataaccgctcccattacatctccgccactgatgatcggacagacgatttcctggtcgaattcttcttcccctgcaatcacaggaatataatctcgtttctccctttctgaccgtatcggtttccggcattgtatcacatcttccaattctttgctgatgtaaccgttccgtagttccttccccccatttccggacactgccacaatctgctccatgtctgtaatgcatacgatacagttcatcgtatgggcaagactctcagcatataatcccgcaatcatgccaatttctccaattggagaatactttttcaaaatcacctttccctctctgtcggtaaaaatttccatgggttctccttcccggatacgcagcgtcctcctgatttctttcggaatcactacccggccaagatcatcgatccttcttacaattccagttgctttcatataaaaaatccctccatctactgtactttccaattttggaaatagtatctgtaaatgaaggaattttattcacaactcattgctgctctataaactcttttcatcgtcagatttcacttttttgtacccaacagtcagcacattactatcataccttttccagaagatatttaaaaggcaaaacccctcatttacaattcttttcctacttgaaaataaaatttgtaaatgaagggttttctatttttattcactcatttgcttgtactgctgcgcaatatttttcacatggtctcccattctttcaaagtccgtcaacatttctgtaaaaataattccactctgtggcttacattttccctttttcatgcgctgcatctgtttcttaaagtatttatctctcagatcatcaattttctgttctgccgcacttgcttcgaagagcacctgtgtcatatcgctgctttcttcattttttacgatatcaagcgctgccagacactgttttttcatttcttcaatctcttccaacgccacatcagaaaatgacagatcccattctttgagatcttttgcatatcctgccagattcatcgcatgatctccaatgcgctccagatttccgatcactgcgtaatacccattgatgatcttagaatcctcgattgacttttcatttgagatcaaagatacgatatattcggaaatctcacgattcaaataatcaatgtacgtctctctttctgaaatccgttccatttctttttcatcatacttgatcaatacgtcataagctttcccgatatttttagaaaccatcatacgcattctctcaatctcatccctgacctgtgaaagcgcaactgcactggatccgatcgcatagttcgactcaaaccgtgtaatgtatttgagtctgtaatcttcgtcatcctctttcttgctatccggaaggatccttgttgccagctgtgccataacatttccaaatggaagcaagatcaatgttgttacaatattaaatgttgtatgcacattggcaatctgtgcaaccggatttcccggggtgagtgcttccatccaggaaacaaacggggttaccatacaaatcactgtaaacaaaatggatccaaaaatattgaacatcaaatgaattgccgtggttcgttttgcattcactttcataccaatcgatgccaaaactgctgtgatacaagttccaatgttctgtccaaacaggatatatacagcactggaaagcggtaccataccggtcgccgcaagcgcctgcaagataccgacagatgcagaagacgactgaatgatcgcagtaaaaattgctccgatcaaaattccgatcagtggattttcaacggttgtcataaaattgatgaaagtctgggattcctgcagaggaaccatcgcatctcccatcatttccatacccataaataaaataccaagtccggaaaaaatcccactgatgtgatgtactttctcatttttaataaacatcatcgcagccacaccgccaattgcaaaaaccggcgcaatcgcagcaatatcaagtgcgatcaactgccccgtgatcgtagtaccaatgttggctcccatgatcacccaaactgcctgactcaatgtcatcaaccctgaattcacgaatccaaccaacataactgtcgttgcagaagacgactggatcactgcggtgatcacagctccaaccagaacgcctttaaaacggttggatgtcagcttttctaaaatcgacttcattctgtttccagcagcagcctccaggccattgctcatcatatgcattccatacagaaacagtgcaagtcccccaagcagggaaagtatgtctgttatccccattgtatttttctcctttttctcttcgcttttgctatttttgttttttcgctcgaaacgagacagatgcaagtaaaaatgcagccgcctcgtttttcgcaaatcccacaattttgattctagcacaccgcatttttcccggtcaatgtcatttcactttttcttaacaagttcttagcgcaatcttaacattgtcttttcccacatggtcttatctcaagtattgaaaacccatcccgattctgttaaaatcaaggaagattcccaaaaacagtggaatttcaatgaatttaaggagagtgaaaacgatgagtaaaattgatgaagtaagaagtgccatgatggctgctatgaaagcaaaagataaagaacgaaaggacgcactgtctgctctgctcactgcattaaagaacaaagcaattgacaaacgtgccgatcttacagaagaagaggaaggacaggtcattttaaaagaaatcaaacagctcagggaaaccatcgagatgacccctgcagaccgaacagatatccttgcagactgcaatgcacgtcttgctgtccttgaggaatacgctccaaagatgatggacgaagaggaaatcaaaactgtagtctctgaagtacttgcttctcttggtctggacgctccaactgcaaaagacaaaggcaagatcatgaaggaactgatgccaaaagtcaaaggcaaagccgacggaaaattagtcagcgaagtcgttgcttcttttatgtcttagctttggcagaactatgaaagtactgattttatcatgtaataccggagaaggacacaattatgcgggcaaagccctgaaggaatgtattgaatctcatcaggataccgcagatatgctggatattatgatgcttgccggtcccagaatctccagactggtaggaaacagctatgtcaataccgtccgtcatgcaccgcatttttttcagtttttatacaaacttgggaatcttgtcagttcttccaaacatcattccccggtctactatgccaatgcgcttctggcgaaaaaattaaaggcctatctggacacacatgactatgatgtgatcgtaacgccccacctttttccagccgaaacattgacatatatgaagaaaaagcaattgctttctcaaaaagtcattgccgttgagactgattatacctgcattcctttctgggaagaaactgcctgtgattattatgtcattcctcactatgagctgatggatgaattttctgcaaaaggaattccaaaagaactcttaaaaccttatggcattcctgtccgacaggcattttcccaaaagactgacaagcaaaaagctcgtctgcgctgtcagattcctgaatatgcacaggtatatctgatcatgagcggaagtatgggatttggaaagatccagctttttgttgccgaacttctccgcaccagaaaaccaggagaatatattgttgttgtctgtggaaacaaccaccgtctgcaaaaaattctgcttgcagaatttggaaaacaagataggatccagattcttggatacaccgaacaaattgcagattacatggatgctgctgatgtgctttttaccaaacccggcggattgactaccactgaggctgcagtcaaaggcattcccatcgtacatacacgtccgattcccggctgcgagaccaaaaacctgcaattttatactacacgagggttgtccagcacttccgcaaaaatgcttggacaaattaaagccggtcggaaactgatggcaaatgagcatttgcgtcactccatgtgcaattcacaacatgctctgatcccttctaatgctgctgaaaaaacataccagcttctctgccggatttcttctgagccttcgcctcagatgcagtcttgaaaaggagattttatgaatgaactattttttattttgaccgggtatctctcgggcagcattttatatgcatatttgattccaaaatatgtatctaaaattgatattatagcagacagtgcggatcataatcctggaacattcaatgcatttgcactggcgggggcacgaatcggaatcgttgtcattgtaatggaacttttcaaagggtttttgccggtctatctggctgcacgtgtactcaacaccagaaaatggacctttgctgcggttctttgtgcaccagttgcagggcatgcattccccctgttttatcccaaacgaggaggaaaagccattgcagtttcttttggcatcctcttaggactactcccgcaatatcgtccggtgctgctccttgcatgcttctatttattatttacttttttcatcatcataaaaccgcacctatatcgcagcattcttacgtttgcattgttttcttttaccggctatttctattttcatgaccccgtcatcagcatgggaacttttctgatttccggaattgtaatcacaaggcatttgctgcatcaccaaaaagagcctttcagcattcgctttttacagcggagctgaaaggctcttttttattttgtaattgccgaaattgctttggatcgctccagtgcttttgccaccagataaaaaatcacggagtcaatcggaaccgaaacaacctgtttcataagccttgccggcagaattgccagaaaaccttttccgtacataatcgtcagccaccaggtacccagcaaaaggttcacgatcagtgccaccacgatcttcgccgccaaaactctgccaaacttcaatggacggtgatacaagaagattccataaattacaggacccaaaattgcattcagagtatacccaacgaaatacggccctgttggcttgatcaaaaatttcaggatatctccgatccctcccataacacctccgacgaccggtccaaatagcattgcagccagctcattgggaatgccggaaaacccaatcctgatgaaatccgtaagctggattgagaagaaaaagctcagaaccacaccaatggcaatcagcatagctgtcactgccattaccttggtttttctaagttcatgccatgagtctacaaattgttgttttaattgtttcataaaaaatacctcctttgcagtagtccttaagctacgcacagaaggtatccttattgtcaaatcagtatatctgtctatgtgcagcagcgggatgcgaattatgtaccgcaagtcttcacttttcgtcccgctggcaactccccgtccagccggcacttaacgcacatacttctactctgctcttgttttctttttcgtcgtgattatagcacactttttcaaaagagacaactattttttctcctgaggctcctgaggtcttacaatcggaatctgaaggttgaccccataagggttgatcacaacgcctttggcctctttcatcaacatctttggcacatttttcgcttcaattgccatcgtcttaaactgattttctttattgaattttctaaattccaggatatctgtaaagatcggctgataggtatccccattcttctgcttgagcatcggcattccgttctctttatggattgccacaataaaccggcctcttccgtaattgactaaaatctcttcctgcagttccttcagttcttctgtcagttccgggttttcctgtctccgcatctcctgcataaaatacaaggcagtcagatgcagctgcggattctctacccatattttcccatccggaagttcttctgtatttggacgcactaccaattcctcaagctgaagtctggcttcatcttccatgtttttattgatcaaaatcccattgattcccatcggatacagacttgagaagaatccaagcagctgactgttttcaacctttgcaatctgaatcggaattctctgttcgatcagctttttcccttctctttgcgcatcctcttctgtataatataacagtacttcatcatcaaatgtctcttcgtcacacagtacatacggcattttcgtacacagagacataaagacatacgtctctttcgcattccgcagactgtttaaaacctgtttcctttccggtgactgtccgtttttattttcctctttcatcaaactgattcctttcttctgttgatattcccaattctttaattataccaaaatttcatcctgataccaatactattctggattattttccactttgcacattttcagtctcaacaacgatccgtgtcagatattcatcctcctcagacgtcgtaagtccgtcaaacagaacatcttcatagacatattttcccaactggattttattttctctggcatactgcaaaatccgttcatacgtctgcccctgtgtctgccatctgcctttatgataagccgtcagatagattcccgccggtctgacatgacattttactttttgtggcttctcatccagaagttcataaaaaatagaataaccgtcaaaaacacctttttggatttcgttcacattctgtcggtaaccgatggaatacgcacttttgatttcatgttctgcacaatactcaaacaatgcaccaatcttttctgcccattcccgttcattcatgtccgtcacgcaggactggatcatgtaccgggcaggttcttctgcaagtcggattatctccgtatccgcctgcatggttttcttaataatctcgctctttttctcaatccacactttcatccgcctcaaccgcagtatctgtttctcaagcatggttctttctttttgaaacaaccgcaaaagcctttccgggctcctgtgattcatatatcctttgatttcttccaaaggtacgtccaattctcgtaaagtctggatcacctcaaacatatccagctgctcaaacgagtaaaaacgatacctgttttccaatttgatttccggagaaaacaacccgattttatcataatagaacaaggtatcttttgtcaccccgactaattttgcaaactctccggttttcatatatctttcctgattcatttttattttcctcttgactatagacttactctatagtttatgataacagggattttaagaaaaaacaactgacaggagcatttcatatgacaaattctattgcaaaagatttccggtttttttcgctgctgcgctttgcatttccaactatggtcatgatggttttcatgtctttatacacgatcatcgatggaattttcgtctcccgacttgttggcacggatgcactttccgcagtcaatatcgtgtatcccgccatcagtctgctcattgccgtcggcgttatgtttgctaccggtggcagtgcgatcattgcacgaaaacttggtgaaaagaagatacaggaagcaagagaagatttttcatttcttcttttggcaggctttctttttggaatcctctccatgatcctggggaatctctggatcgaacctttcgtacgtctgctgggtgctacagatcggattctcgactattgtattgattacttaagcatttccctgtatatggccccggcatgtgttttacagctgctcttccagagcttttttgtcactgccggaaaaccggtgatcgggctgattctcaccatcagcggcggactggcaaacatgattttagattatgtttttatgggccctcttcagatgggtataaacggcgccgcccttgccaccggaatcggtcagatgataccgtctgttttcggaattctctactttttatttgtacgtcactccctttatatcgtacgtccgagaattgatttgcaggttctgaccgaaagctgtctcaacggttcttctgaaatggttacaaacctgtccgcagctgtcgtaacctatctcttcaatattacaatgctgcattttctcggagaatccggcgttgcagcaatcacaattgttttgtatggacagtttttatttaatgcgatgtacatgggattttccatgggagttgcgccggtcatcagttataaccatggaagtcagaatatacgtttattacaacgggtttttaaaatctgcattggatttatcagtgtttcttccattgtcatcacactgatcgcgctgatttcctctccggttattgtggaaattttcacgccaagagggacggatacatacacgatcgccaaaacaggattctttctattttccttcaattacatatttgccggactgaacattttttcttcttccatgtttaccgcattttccgatggaaaaatttctgcgttcctttcattggtacgtacatttgtcctgatcgtgatcaacatcctggtgcttcctcttattctcggaatgaacggaatctggctttctgtgccgattgcagaatgtatgacggtctttttatccgggtacctgatctggaaaaaacgtcatgactatcactacatgaaaaactaaaagaatgccgccgcatcttcccgtacccacagatcgatgcagcgcattcttttagtcttctaccgtgattttttcaattacaggctgattctcagccttcactgttccgttatcatcttctacaggggcatccttacagatctgatccacgatctccataccgtctgtcacatgcccaaacgccgcataatctccatccaaatagttgctgtccgcctgaacaatgaaaaactgagagctcgcactgtctggagcctgtgctctggccatagagatggttcctcttatatgggaaattccgttctctactccattgctcgaaaattctcctttgatcgtctgatcagcgccacctgtcccatttcctttcgggtcacctccctggatcataaaaccgtccataatccgatggaaggtcaaaccatcataaaacccgtcttttgcaagattcacaaagttcgtcactgtgattggagctgtgtctgcgtctaactccactgcgatcgttccataatccctgacttgaatttccacgtggtgagttccactcagcagatcctctgaaacttcttcctgtttctggcatcctgtcatcgcaaacaaagcaagcacaaccgctgctataattccaatttttcttttcattcttccatattcctttcagccaaaagaggttctgtccggcatatgccgaacagaacccccttttctattacatattttattctcaacagtgtgacaaagaattatgcatttttttccgcaatggcagcctgcgcagcagcaaggcgggcaatcggcacacggaatggtgagcaagatacatagtccagacccagtttgttgcagaattcaacagagcttggatctccaccgtgctctccacagattcctacgtgcaggcttggatttactggttttcctaatgtgattgccatatccatgagtttaccaacacctgtctgatccagttttgcaaatggatcattttcaaagatcttagcatcatagtaagcatccaggaattttccagcatcatcacgagagaatccgaatgtcatctgtgtcaggtcgtttgtaccgaagcagaagaagtcagcttcttttgcgatctcatcagctgtaagagcagctcttgggatctcgatcattgtaccaacttcgtatttcaggtcacttcctgcagcagcgatctcagcgtctgctgtttcaactacgaatttcttcacgtatttgagctctttgatctctccaaccaatggaatcatgatctctggttttactgtccagtccggatgtgctttctgtacattgatagctgcacggattacagcttttgtctgcatcttagcgatctccggatatgtaactgccagacggcatccacggtgtcccatcattgggttgaactcatgaagtccatcgatgattgctttgatctgctcaacagttttgccctgagcgtcagccagtttcttgatgtcctcttcctctgtaggaacgaactcatgaagcggtggatcaaggaaacggatagtaaccggatttccttccagtgcctcatacagtgcttcgaagtctccctgctgttccggaaggatcttctcaagtgctgcttctctttcttctacagtctcagaacagatcatctcacggaatgcatcgattctgtttccttcgaagaacatatgctctgtacggcaaagtccgataccttctgctcccagttcacgagctttcttagcatctgcaggtgtatctgcatttgtacgaactttcattgttctgtatttgtcagcccatcccatgattcttccgaattctccagcgattgtagcatcaactgtagggatgattccgtcatagatatttcctgtagatccatccagagaaattgcatctccttcgtggtattcttttccgtttaatgtgaatttcttgtttgcttcgtccatcacaatgtctccacatccagatacacagcatgtacccattccacgtgcaacaacggcagcgtgagatgtcataccaccacgtactgtcaggataccctgagcagatttcatacctgtgatgtcttccggagatgtctccagacgaacaaggattactttttctcctcttgcagcccagtctacagcgtcatctgctgtaaatacaactttaccgcaagcagctccaggagatgctccaagtgcttttgccattggtgttgcagcttttaatgcagcagcatcaaactgtgggtgaagcagagtatccaggtttctaggatcgatcatagcaacagcttcttcttctgttctcattccctcatcaacaaggtcacaagcaatctttaaagcagcctgtgctgttctcttaccattacgtgtctgaagcatatacaatttaccgtgctctacagtaaactccatatcctgcatatctctgtagtgtgtctccagagtattgcatacttctttaaactgagcaaatgcttccgggaatttctgttccatttcagaaatgtgcattggagtacgaactccggcaacaacgtcttctccctgtgcgtttgtcaggaattctccaaacagtccgttctctcctgtagcagggtctcttgtaaatgcaacacctgttccacagtcatctcccatgttaccgaatgccatcatctgtacgttaacagcagttccccatgaatacgggatatcattgtcacgacggtatacattcgctcttgggttatcccatgaacggaatacagcttttacagctcccatcaactgttctttcgcatctgaagggaagtctgtaccgattttttctttatattcagctttgaactgtccagctaatgtctttaagtcttctgctgtcagttccacgtcaaggcttacacctttttcttctttcatcttgtcgatgagctcttcgaagtattttttacctacttccataactacgtcagaatacatctgaatgaatcttctgtagcagtcccatgcccatcttgcatttccagatgcctctgccagagtctcaacaacttcttcgtttaatccgaggttaaggatggtatccatcataccaggcatagaagctcttgctccggaacgtacagaaacaagtaacggattttctttatctccgaatttctttcctgtgatttcttccagttttacgattgcatccatgatctgcgccataatctcatcattgatctttctgccatcttcgtaatactgtgtacaagcttctgttgtaactgtgaatccctgtggtaccgggagtcccagacttgtcatttctgcaaggtttgcgccttttccaccgagaaggtttctcattgttgcattcccttcggtgaacatatacacccattttgttgccatttttaaacgacctcctaatataatttttttcaaataaatttgcactaagtcgcatataatattttaatggttttgccgaaatacgtcaagccttttgtacataattatgtacaatttttacatctgttttttggttattttgttcattccacctttcatttttcagcatttccctaagacatcgtcgcaaatttcacaatatatctgtacatcttgcacaatttcaagaaatctcatcccacaaaaaagaagatacccacacaaggtatcttctcacacggtctgttatctcatatctttcaaaaatgcacagtatccacgatatgcttcatacacatccgccttgcttgcaagttcccatggagaatgcatactcagcaccgcaacaccgccatcgatcacttccattccgaagtttgcaagaatgtatgcgattgttccgccgccgccggcatcaatcttacccatctctgtcagctggaatgcaacctgattttcatcaaacacatgtctcagtcttgcaatgtactctgcattggcatcatttgatccaccttttcctctggatccagtgtgcttattgagcaccatcccttttccaaagaacggattggatctcttgtcgtaaacatctgcatgcatcggatcaaatgcagctcccacatcagatgagatcatcgtagaatttgccattgcacgacgaagttttaactcggaaaactctccgcacttgtcgagaatctctgcaacagcattttcaaagaaacgagactgcattccagttgctccaacgcttccgatttcttctttatccacaaggatacagcaagatgttctctttttgttttctgtatggaacattgccatcaaagaagtaaatgcgcacaccctatcgtcctgtccgtatgccatcaccatactcctgtccaggccacagtcgcgtgcttttcctgcaggaacaatttccagctctgcggacatcagatcgtctttctcgatatcataagtctcttttaacaatttcaatacatgtgctgcaaccgcatctttttcctcaccgcaaagtggtgcgcttcctgccagaatatccagtgcttctccttcaattacagaggctgctgtcttttccatctgtttggctccaagatgtggcagaagatctgtaattgcaaaaactggatcttcctctttctcaccgatcacaacgtcaaattttgtaccatctttcttcactaccacaccgtggatagccaacggaagtgtcacccactgatatttcttaattccgccatagtaatgtgtatccagatatgcaaaaccactttcttcatataatggattctgcttgagatccaaacgtggggaatccacatgtgctcctaaaatattcattcctttttccagaggctcctccccgatctggaacaatacgatggattttcccatccaatccatgtatactttatctcctgcctgcaatgcatctttctgattcaagtctgcatagccctctttttctgcaagacggatcacttctgttacgcattctctctctgtttttcctgcgtcaagaaagtttttgtaatctgctgtcagagtttcaagctctgcaagctgtgtgtcattatatatctcccacaatgttttttccatagctgtttttctatcctttctgttgtcttttctccatattatactatctcttccccccaaatacaagagagctcctcttttgttttcgttttccggcttttccaaaaaggattgttcttgttttttttcgcatattttgctatattttactatattgtctacattccaggaaggaaaagcggactgccgaaaattatcgctgacaatatcatattgcacatcgaaaggagaatttatgagtttacacacttccaaaaaaagtcccgaagagattctggaagagaagattttgcttctttcttttctctctggcgtctgcttcgtgatcgtagaattgttttatgccatatacagtcattcgcagtctacattaatggacgctttatatgatgcttcagaacttgtttttatcgttctgcttctttttttaaccccgctgtttcatatgccggtttctgagaaacatccctatggattttttcaattggaatctgtttttattctgattaaaaatatcatgctgatttctgttaccgcaagcgttcttaccggagtgatcgaaaaattattttctggaggcagccatattgataaagggcaggtttctctatttcaaatgatccttggcttcgcaagtcttctcattttactgatcatgaaactgatgagtaaaaatatctcatcgcctaccgtaaaagctgagattttaggttggaaactggatgtctgctacagtctcggaatgtcctttgcattttttatttcgatgcagctaaagcatacccctttggcattcttatccccttactttgatcagttgattgccatcgtgatcatgctgtttatgatcccagaaagcatcaaaatgcttctggaaacctttcgtgaactgctgcttttttcaccggatcaggaaactgtcgatcagatcaaacaaatttctgagggcattctaaaggactatgcgttcactcctgtattctacgatatcgcccgtaccggaagaaaaatgtgggtttccatctattttcaagtctctgcagaactcctgtctgtacaggatgtccatacagtaaatcacaaactgaatgctgcactgatgcaggattttccggatgtctgctgcgaactcgttttggataccgaagatttctgatacacaaagtcaaagcaacgggttttctcccgttgctctgctgaaacacactttttttcttacagattttttgttctaagggcacggatcgcgttcaagattgcaagaatcataactcccacgtctgcaaaaattgcagcccacatattggctataccaacagcacccaatccaagacaggcaaatttaatgaccaatgcaaatataatattctggtatacgatccgcaggcattttcgggaaattttgattgctttggagatttttaacggatcgtcatccatcagcactacatctgccgcctcaatcgctgcatcagatcccatcgcgcccattgcaattccaatgtctgcacgtgtcagcacaggtgcatcgttgatcccgtctccaacaaataccaatttctctttgtctgtcttttgagaaatcaaattttccactttctctactttgtctcccggcatcagttcgctgtacacttcatcgatatgaagcatatccgccacctgttctgctacgcattttgcatctccggtcaacatcacggttctttttatgcctgaacgtttcaattctgcgaccgcctctttagaatgtggctttaacatatccgagattacaatatgacctgcatattctccatctatcgccatatgaatgatggttccaatcttatggcaattctgatattctactcctattttctccatcaactttctatttcccgcagctacctgatgtccatctacttttgcaagaattccatatccgctgatttcttcaatatcggagactcttcctctgtcaatctcttttccatatgctctttgcagacttttgctgatcggatgcgacgatgcacattctgccagtgccgcatattccaaaagcactcgctcttccattcgattgtggtgaaccccgctgacttcaaacacaccctgcgtcaatgttccggtcttgtcaaacactacacatttcgcctgtgacagtgtttccatataattggaacctttgattaaaatgccttctttgctggctcctccgattcctgcaaaaaaactaagaggaatactgatgacaagagcacagggacaactgatgacaagaaatgtcaatgcacggtaaacccacattccccactgtgccggctctcccagaaacaacatctgtacaatcggcggaagaaccgcaagtgccaatgcaccatagcaaacagccggggtatacacttttgcaaatttagaaataaaattttccgattttgattttctggaacttgaattctccacaagttctaatatttttgaaaccgtagactcctcaaattctttggtcgtccgtactttcagtacacctgtcatattgatacatccgctgatgatctcgtctccctgttttacatcacgaggaagactctctcctgtcagtgcactggtatttagactggatactccttccagcacaattccatccagaggaactttttctccaggctgaacaacgatcacgctctccggcaaaacttcatccggatccactttttccagaatgccatctcgttctacattcgcataatccgggcgaatatccatcaatgcgctgatatttttccgactcttaccaacagcataactctgaaacaattctccaatctgataaaacagcatcacagcgatcgcctcattgtaatctccgcttctggaataaacagcaagcacaaatgcaccgactgttgccactgccatcagaaaattttcatcaaaaacgcggcgattcattattccttttcctgctttttttaagatgtcatatccaatcacccaatatactgcaagatacagcgcaagctgcaaaatccctgtaactggaatcagatttaaaatgagcgtcataacagatgcaataaggatccttatgaacatttttttctgctttttattcaccttgtttcctccttcaaatttcatatttacaggcagtgtttgttcttacacttattttctgccgcatcaacaattaaacgtttgtttaatctttgtaattacactataatctccatctccgaaaaagtcaacactctgaatggattcttttctaaattttcattttaggattgcagaatcaaggtaaaaatcaaaatgatagacaaaaaaaacaggagatgcgtctcccgtttttattatattctactgttcagttattatacgtaatcaaaatcatccggtccttcaaaccatgactttcgtccctgatgaaggatcagcgccaacactgccacgatcagatatccgatcgcaaacggtgaagttggataaaatccaagacccgcactgtgaataaatccaaagcatgcaagtacatagcccacaactgctgtgattgctactttatgaagctgtttatcaatgatgaatactgtcattgttcctaacaggattccaatgatgatggctccggattttactgcgggcacaccattccacatcacacctgcgtctttgatcatctgcgttacttctgcattatactctgcaagtcctgacggcatcacttctgtcatataacctgccagacccacacttcctgtgatctgtgtatacagataatctgctaccggcggtaccatcgcaattccgattgccgcatagtgcttcttatcacagtctttaaatgcctgcgcaaccatgacaacggcacaccataaaaatgtcaccgcacacactgccggaggtaccatattactcaaaaatgtaaacagaccaaagattcccgcagctcccagcaccagaccggataccagcgcatatccgactcctgcttttgcttttttcaatcctgcatgtccaagccagactgtattcggaacaacccctccgcaaactgcagaaagcatcgtacaaattccgtccgcaaactgtgtttctcttacactgtaattgtcccccgctgcattggctgcctctacattatccattgtctcaataaagttataaatctctaccggaatcacaatcgtcagatatggcgccacaactgccacaccattgatcaggtgctggattccgttgatcggattgggaatgtaaaagccaattccgctgaaatctaccgtagttcttcccaggcagaatgcatagataatcccacctacgattgcaactacaagcggcggaatttttttcgggaataaatatcctccgaaaataccgaccattgctacaaataagattggaagtccgatcagaggatctccgaacacatcaaatacaccctgtgttgccatccagataaatccgattcctgccactgttccaagaagtgcagctcttggcagttttttcttcatccacggtccgataaatccgcccaagaactccactgctccaccgataaagcaggcagctactgctgccgaccatgcaagctctgcatcatttaatgcatagtgaagcggcatgatcactccatagagcattacaaacattgccggtgtagacactccggaaggaagcgccgtaacatctgcacggccttcctttctggagagttttcttcccatatatgcatagtaaaccccacttaacaacaatccaactgacatacccgggataacatacccgtatacgattttatctggccagtccaatactcctgaaagtgttgcgatcacgatcagataatttacaatattatttgtaatggaatacgtcattccaccaatatcaccgcgctgaaaccacggcactaatgtcttttgttttcccattttcccaatccttttttctttttctatttcacttctaccggaataaatgaaaacgttgtgacatcgaataatcccatatctgtcagtttgatttcaggaatcactgccagggacataaaacataatgtcatcaccggttccacttctccgcagataccaagctctgtatacgctttttcatgaatacttgtgagtttttcatccacccactctccgctttgatcactcatcagtccagcgatcggcattggcatctgttcgattacttttccatcttttacaagaacaataccgccttcctgcgcgatcaggctgtttaccgcaaactccatctcttcgtcactgactccaaccacaataatgttgtgagaatcatgtgccacagacaacgcaacagctccttctttaattccatatccttttaagaatccacatgccacattgccggttccctgatggcgctctactacagcaacttttacaagatcctcttccggctctcttacaaattctccgttttcatccagctgaatatgagcagttgtctttttcgttacaacccctcccggaagaatctcgatcacattgacctcatcacttgtcagatgcattttgaatttttctgctgaaaattcttttacgatcacacttcctttcacagatgaaatatcgtatggtgtgattcctggcaaataacttcctttctcagcagtcagttcacctgcaatccatactttctccacctggaagtctttgagatcatccagaagaacaatgtctgcacgatatcccggcgcgatcgcacctctgtcatgaagccggaaacattccgccgcatttaatgtcgccatccgaattgctgtcactgcatccagcccttcttctacacagatcttcaagtgattgtccagatgtccgtcttttaagattgtctttggctgtctgtcatctgagcaaagcagacatcttctgctgttttccggtgtgaccccttttaacagcggccttaagttatgacaggcagaaccctgtctgagcaggatatacattccacgctccagacgcgcttccatctcttctactgtagaacactcgtgatctgccagaatgcctgccgcagaatatgcattcagatcttttccatcaattccaggtccatgcccgtcgatcagttttccttcttcttttgcagtcatcagtttatccagcacactttcatctgtctgaataactccagggaagttcataaattctccaagtccgaggattccatctctttgaatcggctcttccatctccggcgcattgatcaccgcacctgcatgctcaaacggagttgccggtacacaggatggaagcatatatttgatatcaagtgctgtcccttttgctgcctccatcatgtagtccagacctttgatcccacacacattcacaatttcatgcgggtctgcaatgatcgtagttgctccatgaggcaccaaaagtctccccagttcttccgggctgacgtaggcagattcgatatgaatgtgactgtcaataaatccaggtactgcatatcttccctgcgcatccacttcatgaacaccctgatattctccgattcccgcgatcttatctccgctcagtgcgatgtcacctgtctggatcttcccggaaaaaacattgacgatctgacagtttttaatgactgtatctgcgggaattcttcctgccgccgtgtcaatcagcttttttaattcttctttcttcataccgatgtcctcctttgatttatttttcgtttacttccaaaaccggatcaaatgttgtaagcgcaaggtagtcaaccgggcctacatccgtaatcgcataatccgggattgccgtgatcggcaaaaagaacatgtacatcattggatccggcagatcagaacctaacattcttgctgcctgatcgatcttcttctcctgcgccgcgattacctccggttcttcatcactgacaattcctccgaccggaagtggaaggaattccagaatctctccgtctgccacaacaacctggccgccgccctgctcgatcagataattggctgcaattgacatatcttctgcgctgacacccataacaaccagattgttgtcatccggtgctgctgaagatgccatcgcacctttctttaatttccatccggaacaaaatgccagagatttatttccatttcttccaaatcgttccagaacagataccattgccacatcctgttctacatccggaagtacgattccgttttcaacttttaaaacaacatctcttctttttctgacaaatggtccttttacatccatcgaaagaacctttgcctctccgttctgaatggatgccttatattcaaaatcttcttttgtcgtcagtttgcatttcaactcaccttttaacacagaacttctctccggcgctttcagatcataagtcagtttatggtcttttgctaccattgttccatttgtcataacttctttgattccaaatgcttccagatcgtctacaaacagaatgtctgcaattcttccagggcagatagaacctaccatatggtcaatgcggtatgcttctgcgctgttgatcgtcgccatctggattgcagtcatcggtttcactcctgcctggattgccagacgtactacattgtccagatgtcctttttccagaacatcacttgctgtcacatcatctgtacagaagctgactcttcttgcaaatgccggatttacttctgttactgctttgatattctctgccaggaaatgtgtcacggaagactcccggatcagcatatgcattccttttctcatcttttctacaacttcctcatgatcatagctctcatgatccagacgcacacccgcacacaaatatccgttcagatcattccctcttgccattggcgcgcatccgaataccggaagacgattcttaaatgcttctgcaattgctcccaatgtgttttcgtcttcttcctggataaactcacggaccgtttcccagaccccataacactgcggccatttttgaacttcttcgtgcacttcttttgtaaagttaaatgcgactgtagactctggaatggtatatggtgtcttatacggtgctccccagaacaccttcagtggacttgcctgtacttctttctggacttcctgaagtccctccagacccgatacggaaatatattcatccagaccggaaatcatacttgtagttccccttggcacaactgctttggcatagcttgtaatgctcagcttgctgcattcactgtggatatgaccgtcgatcataccaggaaccagatatcttccttttgcatcgatcacctctgtgtcttcgccaatgtagtcttccacatctcccactgcaacaattgtgtctttataaaccgcaacatctgccggatagatctcctctgacatgacgttgaccagaattcctcccttgatcacttttgttgcaggtgtctttgcacgacctgcacgaatcagttcttttaaattttctacggttgttctttccatcttttaaatcctcctgtttgttttaagtaacaaaaaagacacaccggcccaaaggctaaacaggtttcccgtcctgcaaatgtatcttgaagaattttcaatattctgttgttatcaacatatattcatcatagcatattgtttttaaaatgaaaatataagctgttatgaatattttctattatcattaagaagtattacttatatatcctgtaaaacagaggaacacctctgagcaacaaaacaaaaactgccgcacaaaatgcgcggcagtcccctcattagaattcaaactttttctcaaagtatgctttcagatcttcaattttgatacgttcctgttccatcgtatctctgtcacggacagtgactgctccatcttcttctgaatcaaaatcatatgtgacacagaaaggagtaccaatctcatcctgacggcggtaacgttttccgatatttcctctgtcatcaaattcacagttgtatgtcttgctcagttcagcaaatactttctctgcaccttcgttgagctttttagacaatggaagtacaccgatcttgaccggagccaatgccggatggaaatgaagaaccgtacgggtatctccgccttccagttcttcctcatcgtatgcactgcaaaggaatgccagtaccatacgatctgcaccaagagatggctcgataacatatggaatatatttttctttcttctcatcgtcaaaatatgtcagatcctgtttggatacttcctgatgctgtgtcaggtcgtagtctgttctgtcagcaattccccacagctctccccatccaaacgggaataagaattctacgtctgtagttgccttactgtagaagcacaattcttccgggctgtgatcacgataacgcacttcttcctctttcaatcccagagaacttaaccagttcaggcagaaattcttccaatagtgaaaccagtcaaggtctgttcccggctcacagaaaaattccagctccatctgctcaaactctcttgtacggaacgtaaagtttccaggtgtgatctcgttacggaatgattttccgatctgtccgataccaaacggaattttctttctggaagtacgctgtacatttttaaagtttacaaaaattccctgtgcagtctccggccgtaagtacacgacattcttcgcatcttctgtaaccccctgaaatgtcttaaacatcaggttgaactcacggatttctgtaaagttgtgttttccgcaagacggacacttgatgtcatgctcttcaatataagccgccatctgttccttactccaggcatccacactgccttccagttcgattccgttctcctgtgcataatcttcgatcagtttatccgcacggaatctctctttacactctttacaatccatcagtggatcactaaatccgcccagatgtccggatgcaacccatgtctgtggattcatcagaatcgcacagtctactcctacgttgtatgggctttcctgtataaattttttccaccatgctttttttacgttgttttttaattctactccgagatttccataatcccatgtatttgcaagtcccccgtaaatttcagaacccgggtaaacaaaacctcttgattttgccaatgctacaatcttatccattgtcttttctaccataattctttgttcctcacattctttttcatcaattggtaactattataacggcttccttcctttttttcaagccattcctgaattctacagcaatgtctcaagaatctccagagacttaaaatgcttctccacataaagcagacaataccgttccatgatctgagacatttttttcagaaccgcttcactgactgtaaatgtatacaacttctcaatcgtgctgctctctatgtactgcatagtataaagcgtcgaattgtccagcacgatcccatccgaaatcatccctgcacaatctgcacagatcagaccgccttctcttgcactgaacaccatccttccttctcgtttcaggcagtgtacgcactgaaaaacctgtggtccctccccgttgatgcaaactgctttcaattcaaaaatacgccggatcaacgggtttggaatatgtggattggtcaatgctttcatcgtctgatacaggagctttagcatctcccgctcatcattctgttcttttgtataataattcgcgaactccagaaaataaaatccataatatgcgcccatcatatcttcccgaagctctgaaaaataatttgtaatctttacagactggatcgtataagaagaccgcccctcatacatggtaaactctccgaaagaaaagggattgactgcacccaccagcggactgtttggtcttctggcccctctggcaaatgcagagatctttccctgttcttttgtcagtatcacaactcgtctgtcatactctccaaccggtgctgtcgaaagcaccatccctgtcaaaacaatctgattcacctgatcttactcctgcctgtttcttctgttctgccggactgtgatcctcactgtcctttttctctgccttatacgaaagataatctgcaatgtgtcctgttgtcataaactgctgccagtattcttctttcatcggttcacctcttttattgctttctcatctgttccttgttgtacacaattagggtgtccgattctcttgcagatatactatataaaatctgccaaatgctacatctcatcctcatgatacccgaaatttttcatcaggaaatcactgtctctccagtttttctgtacctttacccaaagtttcagattcaccttgcagtccagcatccgctcgatttcataccgtgctgtacttccgattttctttaacatactgccttgttttccgatgatgatccctttatgagagtcacgttcgcaaatgatcgtggcatcaatatgcatcactttgttctgcatcttcatgcggtcaatagccactgctattccatgagggatctcttcctgcagacaatgcagcgccttttcccgaatcagttctgccacgatctgacgctccggctgatctgtaactgtatcttcgtcataaaattgcgggccatatggaagatacttcaggatcacttttacaagttcgtctgtattgtctccatttcgtgcagataccggaacaatctctgcaaaatcatactctttccgatacgcatcgataaataaaagtacttcttctctctttaccatatcaatcttgttgatcacaaggataaccggtgtttttacacgtttgagctgttctatgatgtgcttttctcctgccccgataaatgtggagggctctaccagccacaaaaccacatccacctcatttaatgtgcgctctgccacattgaccatgtattctcccagcttattctttgctttgtgaattcccggtgtatctacaaatacaatctgcccttcttccgttgtcaaaacagtctggattcgattgcgtgtagtctgcggcttattggatgtaatcgcgatcttctgcccgatcagctggttcatcagtgttgattttcccacattcggtcttccgatcagtgtcacaaatcctgatttaaaatcatctctcataaattttacgttctccttatcttgggtttcttaaaacaatgtcttcacttccagaaacatctctttttcttcttctatcttctcttcacttccaatgacacagatctgctctgcctgaagcattgcttctactacttttgagagtgcgcggatatcttcctgtgatgcatgcaggatctgactgcgttctgtacggatcatctcttcagatacatgattcatatacaggttcatagagcgttctccctttgcagcaggattcatcggccggtcaatattgctgatggttccgatgatatattttgtcatatcccgttcatcgactgtaaaattgttcagatattctacaacgccttcgtatgtttccattgtttttttcaaattcggatccctgtaagaaatcagatatccttctccaagccggttaaaattactcatacatccgtatgcaccgcctttgacacggacattctgccagagatagtcataacttaagatcactttcaaaatctgcaatgcaccatgatactgcgcaccatgatcgataaagttgccgactcttgccacatactgcacttttgaagaagttttaaatccttcgttgcgtttttggcagttcagtatgcacggtgtttcttcctcatccagttctggatacaacgtgtctttgatttcacaaaacgcagattccatcgaagcaagcccctctgctgaagaagtatagctgatcataacattatccacacggaaaatctggcgggacagctgttttaaatttcggatcagttctgcctttttctcgtcaaaatgttcttcgatctcacgcaccacttcataaaatccgataccgtctgtatcatccttaaactttgataaaggtgagccataagacaatgcacgcagcgccgccgttgtgtgaccagaagactggaatgacatctgcagtctggatttgagcatcgccagaatctcttttaaccgcttttcatcatccagctttgactccatcagaatctcacgcatcatggcaaaaagaatcttcatctgcggatataatgcttttcctttgatttcaaatgttgcccggaattctttttcttctgcctttgtcacatccggatataattccagagaggttccaatccctcctgtatgcacattgatctcattgaataattccccatactcatagtggttcgtatcaataatccccagtacactctgcaagattcctgtatatggaagcagctcctgtgaaacaccggaaaggtcaaacataagagtggcataaccgatcccgtttgactcaatttcgtgatgtaccagtttgacaccatccagttctttttctgtattatacaccggtgcgatttcttctgtgatatccgctctgtttaaaaccggaatcttttccatatcttcctgtgcatcttctgtctcctgataccttgccagttcttttgtatcttccaccagtttgctgatttcgtcttcactcagacttgctttgtatgcagccagcttctcatccagctctttgtccatacgggctgtacggcctttttccggctttacgatcacaaccgagccatgcgtattgtccagcaaatacttctggatcagattttcaaaataacctgtagaaatctgtgctttcaaaaactcaaaagtcggaattgcctgcatatgcataaacggctcattctcatcatacagccagctgtccatgatctgcagaccgtacatcagtccctttgggaaattcccaaaatcagcttcccggaaacggaattcatgataattgatccctgcttccagagattttctgtccattccattttttacgatcgtctgcagcgtctcttcaatcacctggatgaacgcttccttctgctcataatttgcatttttagatacaatcgaaaagattggctgatagattccattgtcatacgatcccataatatctttcccgattcctgcgtccaacaaagcttttttcagtggtgccccaggtgcagaaagcagggcataatccagaatctggaatgccagatacaacttttcatccagacttgtcccgattactttattataagaaagatacgtattgtcctcttctgattcctcactggagatcgaatattccatctccacttctcttactttttcaaatggtgtctgataccggatctcagaatctatctcgatggcatcaaatgctgacagataattttcatccagccatcttaatttctcttccatatccatgtccccgtagagatagatataactgttggatggatgatagtaagttctgtggaaatccaggaactgttcatatgtcagctccggaatgacatccggatcgcctccggactcattcgcataagacgtatccggaaacagtgaattctgaatcacacggtcaagtaccccttccggagaggagaatgctcccttcatctcattatagaccactccgttatattccagcctgccgtctgcatcgtccagtttgtaactccacccttcctgccggaaaatctcatcatgtacatagatattcggatagaatactgcatccatgtatacatgcattaaattctgaaaatctttgtcattacagcttgcgatcggatataatgtcttatccggataggtcatggcattcaaaaatgtattcaatgacccttttaccaactctacaaacggatccttcacaggaaaatttttcgatccacacagtacagaatgttccataatatgcggaactcctgtgctgtccggagccggcgtacgaaatccgatcgtaaatactttattctcatcgtcattggcaaacaacagcacttttgcctgactctttttatgctttaacaaaatcccttttgatttcagatccgacagctcttcttcacggatcacttcatatgcattcaaatcacaaatactcattttcaattgctccttatatgttctgtaatcacatcccttaccggcaacatctgcctgtattacagggtatacaggcattataacatcatctttcaaagtttaaaaggggcgaagatggaaatccatccgccccatatttactctgacttgcttttatactttctctacttttgcagttgtcacgatatccacacccgtctctgccacattctccagaatgatttctccgatttcaaccggagcttctgcacacacatgctgaagcttacgaacgcattccatgattttgtcttttggaatttcctgttttgttttgacagaaacacggccagatgcgcctcctgtcactggtacagtggttgttacaatacgcaccggatgcaaaacctctgtcctcgcgtatttttcccccctcgggcagctatttccctgaattgctgtgactgccccgttttctatcttcgccgtaatctgacatcccagaggacagcagatacatgtcaattcttttccttccattcttaccattcctccatctgcagtctgatttctttaatttctccgactttttcaaacacattttccggaatcagaatctgctccatttctcctggggcagcagactttttctttttctccactatcatcttcccattgagatatagctggatcttgcatcccgcaaatacccggctgacacggaaacggactttcatactgcccttgtgttttgtatgaatctgggacggcactgtatagcgtactccaccgtccgcctggattcggacaaaagtttcttcttttccgttttccggcatacctgcggcatattctgcggccgcttttcctgcctgtgcagcctcttctgacacaaaatctaccaggtcatgtacatgcagtacattcccacatgcaaaaattccctccacttccgtttccagattctcatccacaaacggtccgtttgtcactggattcaatgccacctctgcctgtctggaaagttcattttccggaagaagccctacagacaacaacagtgtatcacatgcataaaattcttcggttcccgggattggctttgcctgtgcatcaacctgcgcaagcgtaactccttccacccgcttctttccatgtatttttacaacggtatggctgagtttcaacggaatctcataatcctccagacactgtacaatatttcgttttaacccgccggagtaaggcatcaattctgcaacgacattgacatgtgcaccctccaatgtcatccttcgtgccatgatcagtccaatgtcaccggatccaagaatcacaacctcttttcccggaagacagccttctatattcaccagccgctgtgcagttcctgccgtataaattcctgccggacgatatcccggaatattcaaagcccctcttggacgctctctgcatcccatggcaagtatcactgcacccgcctgaatctgataaacgcctttttcgctgctcatggctgtaaccttgcgctcttttgtaatatccatcaccatcgtattgagcctgtattcgatctcatgcgtttctacttgttcgacaaatcgtgcggcatattccggtcctgtcagttcttctttgaacgtatgcagcccgaatccattgtggatacactgatttaagatcccacccagacgctcatcccgctccaggatcagaatcttttctgcacctgcatttctcgctgacactgctgctgccagtcctgccggaccaccaccgattattacaatttcatatctctccatcttaattcctcctcaggatcatctcggaacctgctccgttttttgtgatctcttcctgttttttctttaactcacgttccagaatttccatggtcttcggtgtgcaaaagcctgcctgacatctgcccattccggctcttgtcctgcgcttgatgccatccagtgtagttgctccaaggggtctgtgaatcgcatccaggatttctccttccgaaatcatctcacatcgacatacaatttttccatatgccggattttgtctgatccgttcatttctctgttcctctgtcaggtcagccgggtttaagattcctttccttgttccgtcaaaggaaggattttccttcaaatgcaggatatcctttacaagcgcagctgcccgctttccaatcgcaggtgcacttgtcagtcccggtgattcaattccggcgcagtcaataaatccgggggcatctgttacttcttcaatgataaattcatgccctgcttcatgtgcacgaagtcctgcaaacccggtaatcacttgccgaaacggaatatttttcacactgcgctgtgccttttgacgaatttcctccattccctgcatcgttgtatccgttccctctttgtcttcctgatcggttgctgttggtcccaccagaagatttccatgtacagtaggtgtcacaagcaccccttttccaaatttcccgggcagtgtaaaaacagtatgactgacatgttctcctgctgtcttatccaataggaaatactcccctttccgtggcgtgatcgtcagcttcttttcgctgaccatattatggaacacatccgcatacactccggctgcatttacgattactttcgcttcatataccgtatcctgtgtacagatccgatagcccccttccactcttcgttctatcttttttacttcctgatccagaaaaaattcgaccccgttctgcgcagcattttctgccagagcaatattgagcccgaacggacagacaattcctcccgtaggggcatacagtgcagctattgcctcatctgaaatgtttggctccatttcttttaaagtttctctgtccagaatctgcagcccctccactccatttcgcataccgcgctctttgagctgttctaattgttccagctcattttcattcgtacagaccacaagagatccattccttttataagaaaaatccagttcttttgaaagattttccatcattttactgccttctacattcagttttgccatcaaagagccttcttctgcatcaaatcctgcatgaacaatcccactgtttgctttggatgttccacaacagacatctgtttctttttccagtacgcaaaatgttccctgataacgggacaactcccttgcaattgcagaaccactgactcctgctccgattatgatcacatcatacatttaaattcctcccatacaaccaaaaagagcctgacaaacaacacacctttcgatgtgctatctgccagactctcttctcattggcttttctattctcttatacttactatatacctttttcccggatattgacaagtacttttttcattacagctcttcttttgcccatccgtgtgcgtacttcacagcctttttccatccttttaacatctcctgccgctttccattttcaatttcaggctggaatactctgtcaattgcccagttttgtttcacctcttctttgtctttccagtaccccactgccagccctgccagataagcagctcccattgccgtggtctccacacatctcggacgatgtacaggtgcctggctgatatctgcctgtgtctgcatcagaaagttgttggcgcttgcacctccgtccactttcagcgcagacagagaaattcccgaatcagcctccatcgcttccagcacatcatttacctgatatgcaagtgattccagcgtcgcacgaatgatatgatctttgttaacgccccgcgtcagtccgacgatcgtccctcttgcatactgatcccaataaggcgccccaagtcctgtaaatgcaggaactacataacatccattggtgtcctcaaccttctgtgccagatattccgtgtctgatgcagagtcaatcaggcgcagctcatcccgcagccactgaattgcagcccctgcaacaaataccgaaccctccagggcataattgacggttccatccagcccccatgcgatcgttgtcaccagtccatttttcgaaaaaacaggtttctcccctgtattcatcagcaaaaagcagcctgtcccatatgtattttttgcttctccttcttcgaaacaagtctgtccaaataaggctgcctgctgatctcccgctgcccccgcaatcggaatccttcctccaaagaacgtcggatctgtctcgccgtaaagatcactgcacggctttgcctgcggcagcatacattttggaatttccagttcttttaaaatttcatcgtcccactccaacgtattaatattaaacaacatcgtccgggaagcattggaataatccgttacatgaactgccccctttgtcagtttccagatcagccaggtctccacggttccaaatagtaattccccccgttttgcccgttctcttgctccttccacatgatctaagatccacttcacttttgtcccggaaaaataggcgtcgatcacaagccccgtcttcttctgaaacagctctgtcaatcctttttccttcagactgtcacaatattccgaagttctcctgcactgccatacgatcgcattgtacacaggttttcctgtgtttttatcccagacaattgcagtctctctctgattggtaatgccgattgctgcaatgtcacaggcagaggcgtggatttcattcatcgcctgtcttgctactgcaagctgagtagaccagatttcccccggatcatgctccacccatcccggtttcggaaaatactgcgtaaactctttctgtgccatactgcagatttcccctttttcattaaataaaatacacctgttgctggtcgttccagcatccagtgccatgatatattttgccatgttttctgcctccctttataatttccagacatcctgatttgtagtggacactgcgatcgcacctgcgcaaagcgctgcgatcacatcctctttttccgtaataagccctcccgcgatcataggaatccgactcacttttgcaattttttgaagcacctttggcatgactcccgggagcacttcgataaaatccggccgtgatgtaccgcactgtgtctgcagattttcaatatttttcaatgccagcgaatcaatgacaaaaaatcggagcacggcaaaaattcccaattcttttgcccgccttaccagtgccggttttgttgtgatgattccgtctgcctttgtctgactatggataaactccaccgatacttcttttgtactgagtcccgcgatcagatcgatatgtaccagagcttttttcccagactctttgattttctccacaatcttcggaatcgtacagatatccccatagagcacaaaaatcacctgaatttcttccgtttctgctgctgtctgcaatccgtcatcgttcttcactgctgcaatcaccggattcgtttccactgcgtcataaaactcctgattcatcgctcacctctccatgtctttcttttttcttattttaacactcttatcacgaaaacgcaacatgatgtctattataaaaggagcattgcacctggcaacactcctctttttattttctatgctgttttacacttcttttttcttctcatctgtccgcttttttctacagcgcaatgccataacaagacttacaactgtcattgctcccattcctgcacataccacatacagagcggtctgccaccatggagttactgctacaacctgctgattggcactgagtccgttcattgcattactgtttgccacagtatataaaattctgtgggttgcctgacgcattgcctgcacaatgtccggatcattcttatacagtttgttcaggtcatttgtccatgacatagaagaactgtcccaacaatctgttcctgcaagcaatcctcttgctacatcaaatgttttcatatacagtccataactttcaaactgtgcatttccggagaaatctgtaagaccaaatcctttcattccccattcgccgcgcagtacatttgtcataagaccttcatgtccaccactccatactacacccagacgtgcaaaggagttcatcacattcatcgcgccaccgtctacaatcgccatctcaaatggtttcaaatacacttctcggatagactgctcatttgcccatgttgaaatacaacgacacgctgtttcactgtcattcagcacaaaatgtttgatatatacatagacaccttttgactgaattccttttacctctgctgctgcaattgcaccggagaggaaactatcttccgaataatattcaaaattacgtcctgcatatgcatttctgtggatattcatcgccggaccgtaaagtcctgatgcacctaaatccaacacatcgtttccaagtgcttttccaagttcttccatcagatctacattataggttgcagccatgatattctcatctgcatacgctgtatgacattctgatactcccgtcagattctgtgtgaatccctgcggaccgttgtcatctaccgttgccggttttgacacacttggaacaactgctgtattgtgatatccctgtccgatcaatgtcgccatttcatcgaatgtcacctgatccagtaagtcttcccatgccggatcatcatattcttttccaatcatcatagcaagcgtcagaccattgtccgcacccattgtcggcatttttgtatccgaaccatcaataccttcataggtctgataatcatacaatccatctgcaaacatctcttctgttgcttcaatttccattgtttccggccatgtgcctgtccagttattccgtgacagataggtgatctcgtaaccatactgactcaaatctgcactttcaaactgattggtgatcgcttctccggttgctcttgatacagaatatgtctctgtgtcaagttctttattattgtattgataggtaagctcaacgtttccgtctgctgtcataccgtctgcttttgtatagccttttgcagctaatacgttattgactgcatcgtgtgcattctttgcagctgtcagataatagtcccccgcatccagaatatatgtttttgcaccattctcatcatagcaggccagttcttcccgcataacattgactgttacaacctcagatgcacccggctccagaatctctgttttatcaaatccacacaattctacagacgctttttcaattccattttctttgtcatactctgtataaggagactggaagtaaatctgtaccacttcttttcccgctgcatccccgacattggtcacctttacagaaacttcaaaactatcggtttctttgttgtactctgtcttaaaatcggaatattcaaactctgtataactgagtccatatccaaatggatatgctactgtatcactataattataatctccgacattttctgttcccatgaccacgtcttcataacgtgtttcataataacgatatcctacataaatcccttcctgatatgtaatgtagtgatgatttccgtctaactgtccatttgctacgctgtaccatttttctttatcatctggatcatagttggtataatcgcttccataaattccaaccatcgccggtgctgtcgtattatcatagcagtatgtgtctaccagtcttccgcttggatttgcattccctgtcagaatgtccgcaacaccatttaatccccatccgcctgtgtaaccgatccacagtacggcatcaacgccatattcttcattttcgataaaatcacattctaatgcatttgtagagttgatcaaaacaatgacattttcaaaattgtcctttgccatcttcaacatatcctgctcttctttggtcagagacagcacattttccccgtctttgaagttctctgatgccagatccgcaccttctcctgaaatacgtgagatcgttacgattgccgcatcattatactgagcaaagctggatgtaacatcacttgtatatgcgctgaccggcacctcgttgatatgccatccggcacgtcctgactggttttcctggtttgccgcttttcccggtgtacgcacatagtcttttcctgcaccttttgtgtagaaatcccacaatgcaccattgaccgaaacgcctctgctctccaatgcttctttcaaagtcggagcgttggatgtatcaatgtctgccgcaccggtaccacatgtaaccatatccacactggaatgactcaatgtgcttactttcgcatcctttttcagtggcagcaccccattatttttcagcagtacagaaccttctgcatgcagctgctctgcgacttttcttccgttctcttccagttcttcctcggaatcgaaatcggattcaaaatacgtggtatcctctttcccgtttcctttatctacaattttataggtatctgttttcaggaaaatattaattgcctgtcctgcagataatgcaatgttggttccaataatactgacagcggtcagtattgcaaatactgctgtaagtatcgaccacttttttacacctgatccttttttcttattcttgtctttcataattttcccctttctggatagtattttttcgccgttcactgtatttatgactgtctgaattcctccggcacctgatccatctctttccatgtttgcattgcatcctccaatgacataccacgattgatcgcatcctttcgaactgcattgactgcctggatttctttcattctcctgcctgtcagggaataccccttcatcgcaatcagagtcatgatccatgcgaccatcggaacaatacaaaacagaacgatcaccactccatgcattccatccgaatatggtgtatttccatccggaagtgtatgaattccgatcatagcaactgctgctcccacaacggtagaaccaagagaacttaccagcttgtctaccagagagaacaaagtccccataattccgggaatgtatcttccggaacgaaatgtttcataatcggaacaatctgcaaccatcggaatcggcatatcagccgtagagtaatacgctccataaccaaccccaaagaatatcacaaacagaacggtatacaaattcactggtcccagactcagattccatgccggattgccctgcttccacaaaacgagaagtaccagtactccgatgtacatcacaagcgcgattgctgtataccgcaccagtgatgctttctgtccgtgtttctgtgatgttctgaccgtcagcaggaagaacgggacagaaaaaacatatcccacgatcatcatcggcagatataatccgtcataattttccatcattgctccgtagagcatacacaggaccgtcatattggtagcaatagaaaatgccagtttgcagcctgccccggcgatcatcaggcgctgcagttctttgttggcttttaaaattgccagatattcttttaccttcactttttcctgtgtcttgctgactccgaaaaattccggacgatctttctcccagattcccactactgcaagcagtgtcagaatcgcagatacgacgattgccagcggaatcatcacattgaagaattccgcactgttataaccgcccagtcttttgctcaggattggtgccaaaaactgtaccagtcccataccgatcagacttgcaacggtattgaaaatcgtaaacaatggtctctgcttgggatcattggtcagacaggtctgcccggaacgggtacatgccgtctgaaatgtataaccaattacatacagtgcataaaacagtacaaaacatacatatcgaagccaactcatctctccactgatgagacgtgtcccaaaataaaggcagatggatgacacgatcatgatcacatttccaagaaccataaatggtctgaattttccaaatttcgtggatgtccggtcaatcagtgctccgataatgggatctgtcactgcgtcaaacagacgcatcactgtgaccatggtggtcgcgaacatcaaaagcagtccgagcacaccatttgcataatatgcgataaaattcagggtcagaatgtaatatacattcgttgccccgttattcatcgggaacaatacgagctgatacagttttgcccggttcattccctgtgctgtcgttgttttctgtgacataacgtttccctttctcttcaattaaacccagttcttactctttgtctttttcaatttgtagtccggatttggtgtatctgtaagacggatttccattttatctgtacatccgttctttgtttttgcctcaaacatattttctcgttccagctctgccgtaaactcaaaaatatggtttccctgtttttcttccaacagttttccattctggtacaacgccacactgccacagtttgaatatactttgatcctggttttcttttctgtccgatccacatatcttcttccacagatatgaacaaacggttcgtcactccagtaagctttatagagataaaaactgtctttttttacctttctgtcaaacgtcacaagtcctttgtggttcatccccggttctccgccctggtctcttgcgtctgctgcaaaatcaaacatattccatacataagttccccacataaacggatgtcttttaaaacattccagcatatattcgtggtaaactgcctgatattcctctgtatggtctccgcgctttggctttgccgaatgcagattgggcattccttctgccccgtattcggaatagcaaagcgggcgcttcggccagattttatgaaatcctttcaaaaacaaatcattcagccatgggaacggaacataccaccccagatacaggttatatccgactaaatctgtaagatgcaccactttgtgggtcggcatacacattgcataacacgccagtgttgtcggtcgggatggatccatcttatgcaccagatcgtttaacatatgatgattgtccagcatgtcttttctgtgtgtatccttgatcgtgatctcattggatatcccccacgtaacaatggatggatgatgtgcattctgaatgatcagctccttcatctgcgataccgtattttctcttccatttacaagatgctcggaaatataagggatctctgcccacacgatcattccggactgatcacacagatcataaaaatactgatcatgctggtaatgcgccagacggatactgtttgctccgatttcacggatcaatgccatatctttgtcatggtgctctgttgtgatcgcatttcctatctctttccagtcctgatgacgggacaccccgcgaagcggataggatcttccatttaggaaaaatcccttctccggatcaaaatgaaaacttcggaacccaatcttctgctccacacagtctgcgacattcccattgtggatcaattctgcacgtaccgtatataaatatggatctgcgatcccatcccacaggtgaacattcggaatctccatctgacaggaagccccatccatatctgccacttgctctcctgactgatccagaaccttccatcgtaccgtttcaaatgttccttttatgtaagattctgcggtcaattctcccatctgacctttcaccttcggtataagacgaattcccggtcccccgaaataatccagatcaaaatgagagtttgatacggtcaaaagtgtgacatctctgtagattccaccataaaatgtaaaatctgctctctgcggatataccctgtctcccactttattgtccacatatacagtcagttcattttcttcctgcagctgctctgtaatctccacacggaatgtagaatatccgccatcatgagaagtgatctccttcccattaaggcaaacccgacaagatgcattgacccctgcaaattcgagatatacacattccttttctttgtcaaagacaggctttgtaaatactttttgataaatacactgatcacgcatgtaatcatttccgccgtcctgaccatcttttccattccaggtatgcggcagatctacagattttgtactgccatccggcattgtaaaactccagccggtcatcagtttttgacttcttctaaccattccctctttgaatgactcctttctacctgcacaacttgttcgattgcgcttttcatcattgatactatcttaacaatatccgcttttgcactcaaccgattttgcctaagtgatgtttttgcacgcataagtgcaaaaaaagttccaatgtctgcaattcattggaacttttcaatactagtttttcaccggaaataaaatcttcaggcaaaaacaaccatcttttatcttcacctggaacactccgttatatttttttacactgtttttaatgctgcgcagcccatatccatgataggctttgtcatgttttgtagtcactggaagattatcttcaaattccagttctctctccaccggattcataatctgcacgatcagaaactggtgctgtctgtgtatcagcacatcaatctgccgtttctcctgctccttgaaatgttttacacactcaatcgcattgtccatggcatttccgaaaatcgtatacaggtcgaccggatgcagaaactccagcccttttccatctgccacacaggaaaacacaatattatttgccttacagatcagacttttttctgttaaaattgtatccagcacatcatttccggtttttaccatcgcttcataaatctgaatagaatcctggatttctgtaatatatttttcccgttcttccttcgtacacatatcccgcagcgcagaaatctgatgctttagatcgtgacactttcggttgatgatatcgatattctcttttgtgatccggtaatgttctttttgctgcctccagagaagatccgaaaccagccgttcctgccgcatcgcactttttttgaatagttcattttgtaaatacagcacgacaatacataaaatctgcatctgcaagatactgaaccagtttccttccagtaaaagcccgtgtgtccctcctgtgcactgtcttacaaaccacaaaaacaaatatccctgcattgccagcaggaccagcgctgaggtcagctgcctcggtccgatggaaaatctcttgtcctccggaatccagattgcaactgtatagcggcaaacaacgactcccacagtgcctaccaaaagcaataccgccggaaatacctcgtgcggaacgtcccactttttatgaagcatccagcaaaataccacactcagctcatatgcgagatagcacgtacaagacgcccatactgcataataagcagcaactgctgccgtcattttcacattgctccacagtgtgatcaataccaatacatatccggataccatccacatcgtagctccaagatagttctctgcctgaagcaaaaaagacatcccgatctgtgcgagaaaaatcgccgccactgtcaccgtcatagaataaccgaaatgttttcttttgggaaacccggctgcatagatcacaccgaatcccaggtacatcatggttgccagtatatttacaatccagatcatctgtgacttccttcccctacataatccatcagtgcattcaaaaatgcgttcttcttacgctggctgatctccagctctttttctgccacaactgccgtattgtcccggacttccgtgacatatttcagatttacgatataccagtgattgcacttcacaaaatgatagggagacagcatatccaaagcatttttcatcgttccccgcaccacatattccccttcactggtatgataatacaacatcctgttctgaatctccacataatagatcgcatccaccggaactttttttaccgaatcctgcagtttgagcaaaatttcttttccgtttttctgaatccgcccgattgctcttgtaagctttaacgaaaatgtataataattgacaggtttcatcacaaaatccagcgcacccacagaatatccgcgaatggcatactgaatcatattggtgataaacatcaggacaacattttcatctgtctgacgaatcttctctgcggcttccattccgttcatccccggcatctcaatatccagaattacaatatcatagacaggatgatatccctcgataagctcttttgcatctgaaaatgtagtcagctggatatcggtgttattttcctcctgatattttcttacatacttttcaattttagctaaaaatgcagcatcatcatctgcgattgcaatttggatcatcttctcacctccggaggattgtgtttcttttcattctactataaggtatgattacttcgcaagacaaagttaaaaagcatttcaagcagaattttttctgtctgaaatgcttttcctgtatttacatgatatattgaatgcgataatgcccggagcctgcactagctgtcatacaattttcttctgttctaaactgcagtgtgtctgtctccaccagctccttaaccttcgataaacggatttctgctgtcgtatttgccggaatctgtacatcgactataatccgcgttccgtttcttctccagttgactttatgcaccccataacaggaatgatagcttccttccacaaactccagaccaccgccaatttgaggttctataatactatgtttgaatccaggagccgcttcatctgcctctattcctgccattacccggtacatccattccccaattgccccatacgcataatgattgaacgaattcatatctgcactccacattgttccatcgggtttcaacccatcccaatgttcccatatcgtagtcgctcccatttttacctgatacagccaggatggaaaatcttccttcaacagcaattcatacgcttcctttgtgcatccattctggctgagtgcatgacaaaaataaggagttcccacaaatccggtaacgagatgtccgttttctttttccagaagcttttttagacgtgctgtgattttcgatacatattcttttggaaccaattgaaaatacaatgctacgatatgtgccgtctgcgtctggctggttaagttcccttgtgcatcaaaaaatgtattctgaaacttcttcacaatattctgatagagcgtttgatattcttttgcctctggttttcctaggatttttgcaattctggcaaataatcctgtagaatatgcgaaatatgccgtacaggtcagatcatttggtgttgctccaaaataacttccttcctccgcatccaatgcaacccagtctcccagctgaagcttataattccatatataatcttccgaatgctttctcataaactcaatccatgaccgcatactgtcatattgtatccttaatatttcctgatctccatacatcagatacagagtccatggaataatcaccgctgcatctgcccatgctgctgcagaatggggactctgactgagcagccagttatcttctgtatgtccttcttcaatgttggggatcacatgcgggacacctccctcttccgtctgatccagagccagatcgtgcagccactttttatagaatgtatatgtattcatcagataacatgctgtccggcagaaaatctgtgcatctccggtccatccaagtcgttcatctctctgcgggcagtccgtcggaacatccaggaaatttcctttcattccccataggatattgtgatgcagctgattgagcagcggattggatgtcacaagtgttcctttggactccatatctgaatgcagagtatatgccgtgaagttttctggttttggtgtccctggccaggaaatgatctgcgcatactgaaatcccatatatgtaaatctcggatgccaggtaactgtttcctctcttgcaaatgtatatttcatttctgctcttgcttctcttaaattgtccaggtacacattcccttttgcatccaacacttcaaagcattttaaatgaatgacatctcctggttttccgtgtgctgtcacatgaatccttcctgccatattctgcccgaaatcaatcacctgctccccttttggtgtgtcaaaaatgcgttttgcttttactttatcaatcattttcacgcgtgccccgctctgtgcccgcatcacactgacatcaaatggaacccgaaccgtatcgttccacacaccttccggggtgatgcatgtacaccatccttctttttccagagacgcatcataaatctctccatgataaatctctgaaaacaggatcggcgaatcgcatcctttccatgtttcatctgtgaaaatatcttcttcacttccatcctcatagcgaagatgaatctgcatcgcaaatcccatctgatccccataattgtttcggctcttcgtcaagcccattgcacctttgtaccatcctggaccaagcatgcttcccgcaatattggttccttcttttagcagcgccttgacatcatagatctgataaagcagatgttttctgtaggatgtccagcccggagtcatttcgtcttctcctgcctgttccccatttaggaaaaactgatacagtcccaggcctgtcgtaaatgcaatcgcctcctgcactggtttttttacttcaaaacaaccccttacataggttcctttggagctctgtttgtcttcctctgttgtgtccacagaaacaaacggcgccctccattcttcatccaggagtgctgtgataaaatatgccggttcactccatttggatgcttctgtctgatcttcgacccttacccgcacgaaatacttctttgcggactgtaatttcactccccgtggctgcacatgtgcggaatcctccgcgaaaactacaccactgtcatacaccggttcctcaaatcccctgttttccgaaatctgaagctgataagatttttgcacaacctgtcttctgctgctttcaatctcccagccaatctggggcattcccgacgctccgatcagagggttttcataatccatatgtattctgtttacttttaacatcccttcctgctcctctctaaaacaagctgtatcctatttttttattctgctgcaggcttttaaaaaatacgctacctgctgatctgtcacatctgcatcaattcccacacaggaaactgacagttttccatcctccacacgccctgcttgtgtcagtttttctattttgctgcaaatctcactttctgtagtttctctcaattccacaggactgaaccgggcattcagccaaatatccggaagtttttcccgaactgttttcaaatcagaccctgccccaacttctgcaaaagtcagcccccggattttggcatatccatccacaacatgctccatcgttgctccgcaatgatgcactccaaaatgcccaaaatgatccgccaatctctgatcctgtttcagcaaaaatttttcatatagttcgtttgagatcatctctacagaacaattggaagtcagataacattccggctgcaccttccgcacgattgctgtcactcccccggaaatatctccggagcatttgcgtaactcttgtccaacctcaataaccagaccggtaattttttggaaaaattcttccacctcatccggggccgaataatatgccatcagcacattctgtcccatcagatccattgcaatgttctgtattcccatcaaatttatataagtttccacatgcccaaattctctctggaaatactctatctgctgctttgttcgattccacacttcacttttggaaagatccggggtctggatttcctccatatcttcctcatccagatttctgcagagcacctgtggggaattatcctcctgatataaaatctgacagcccaaaagctccgagtacaaataccctgctgccagaagatctgttccaagtaaggggcgccttttcggatttttttctccaattccatattctccgaatcgttcatataaggcctttctcatcttgatgtcgcattccattctatacctgggatcatcaaaaaactcctgtgaaaaacaaattcctacatttttatgccaccaggacggatgaaacgtaatgtcatatttcataacttcctcctcttttctgttactatctttttcgcaaaacagtctgctgtactcaatgtactatttccggaataaaaaagctaacaaaaatgcctgctgcttagcacatttgttagctttgtttcttatccatttccagaggtctttttatactcactcggtgtcatatgatacatttctttaaactgtttggaaaaataggaaaaattatagtatcccgtatccattgctaccgttccgaccgaaagattcgtcgtatcaaacagacgcttcgcctctttgatccgaagctgattgatgaatttattcagggaaattcccgtctctgccttaaaaatatgagacagatacgatggattaaaataaagtgcatttgcaatatcttctctcttgaagtcttctgaaagatgctccattacataatgctctactttctccatcacttcaaaatttcgtttttcgttcttttttagttcctgaaaatacctgttctgtatcttttgcgtccagtctctcaattcgtccaaacttcggtatacgtttctttctgaatttgaaaatccgtttaagaccccctccagagaatttctgcgagatgctgtggcaaaactataccacagtcccatataaagttctcttaaattttttctggctgtcagtttgttctgttccagtacttcgaacaaactcttaacctgttccgaaaattctgcttcttttcctctctccagcatcgggatccaatccacaacctgaggaaactgctctacggtatctcctgtatgttcctctccttccgggtaaagactagtgtttgactttacaaaccgatctgcacggatcagcaaagactcacatactgccggtatttcgtatattgtaactgctctgcctggatacatacgaaacgcaaactgctggcagccgatcattgttcttatcttttcttctatctgctgcacatcttcctttgagcactctttacagacaaaaaacagcagcatctcctcccagacaatccccgttgttcttgcaaaaaccccagtctgatccatctgcatctgctgcagcacatttctgcagtattcctccatttccatcattccaggttctgtttctgcagccatcagaatcggggtcaccttttcttcccgcgcctctgggagcatcgcatatttcctcagttctttattttgctttgagtacgcaaaatttcttccttccaaaatgtctacccagaatttttcaatcaacagagggactgccatacgcagactctccaatttttcttccgtattttcttcttcctgtatcttttcaatacactgtctcacccgttgctttagctcctcatgcactactggttttagcagataatcttctgcctgataatgaagtgcggaagctgcatagtcaaatctggcatacgctgtcaaaagcaggacttttgtctttggaacatgctcggaaatccaggcaagcaacttcagtccactctcgtctggcatctcaatatccgaaatcaccacatcgatgtgctctctctccaaaatggctcttgcttcttttacattgcagaccccatatacttttgtgattccaatctctttccatgaaatgccttctgtgatcccccgcacagcaaagatctcatcatctaccatcagcaggctatactctctcattcctgttttccccttttttgtagttttctccatcgaactgtcttccaaattcccttttttcattcggcagaatcaaacagactcttgcaccgccctgcggtcgattttccagacaaatcctgcagtcacctccataccagagccgcagcctccagattgtatttttaattccgatatgccgatgaaattctttcggatactccggtgtatcataacatgttaaatactcttcatcaaaccccacgccactgtcactgatctctacctcaaaatactgcgttggattctctcgccagggatgcacacaaatttcaatcagaaatgcctgatctcgttttttaaatccatgtatgatgcagttttccacgaaagtctgtatggtaatcatcggaatataataatgattgttttggggttccacctttatgtgatacatcagattttctccaaaccgcatttgattgattttgagataattttccgtatattgaatctctttgttcaactctgtcagatgctgttctgactcctgaatgtatttgaaatgattggacagataaatcaccagctgttgtacatttgcattttcattcaacaccgacatattataaagaatattgagtgtgttaatataaaaatgcggattgatctgcatctgaagataccgatattctgctttttgtaattgtatttttttatcgtatgtatcaattttcagattgtgtatatgttctaccatatcattgaatccatggacaatgctggaaaattcccctttccactcttcttcgatccgtatgtcccaatttccgcctcccacctgtttcattgcagtttccagtacttgaatcggtttcacgaccgcttttcgcagcatcccaatgtacaataacgccactgcaagaatgaacaccggcatgatatattgaattttcttcatcacatacaaaggctctaaaattgcctttttagaaatctgaaggcgaatctgtaagggcgcatgtctggatttttctgaaatcaccagatattcgccattttcgttttgactgatcttatttgcttcctcattcgtcataagctgtatattggaatgctcttccaatgtatttaattccggcatcaaacaagaatctttaaaaatgactccgatataaatattacttttcacatatattgttttatagatcagtattctgtccgcttctttctgcacttcccaggaagatttggaagttccgaactttttcacatgtgcagcgagaactttttgggaaagtttttctccaagttctgattctgtcgtaatgatccttttccgggcagaatcgtaaatgaacaaagcatctgccggagacgctgaaacaagatcccggcgcaaatgatttctcaatgcttgaagcgtcagaatatattctgtttcatcaccataactccaggaaatctcagacgatgctctgaattttactttatccagataattgtctacttcctgaagccgggaatcaatctgtcggatacaactatcgagcaacgtctgattcgatctgcttacttctttttgaatcacattctggctatatgctgtcaccccaaacaaaactgttgtcagcgggatcataacgattaaaaatgcaattaagattttttttgtcagcgtataattttctatttttttccagattttatttctcaatttcatgctcctcactgcaacagattttactcacgttcaaacatagggatagggaacgctgtggtctcccattccatcgctccctatacatgtttcactttattgatacagccaatccagtttatccagactgttgtctgacaaacctgcattccgcactttgatcggggcatctatcggaacaattccgacaattgtataccctcccgttcccatgtagatttcatgaattcccttctcataacggaatgcatgaacattgaccagcggacatccttctgcataaattgctgaaccgtatacaacagccaggccacctctgtcatctgcatgagtgttcgtctccaaatctggaacttgaagccattctacaccttttgcattcatatagccgaccagaatcaggctgtcctcttttaactcaacttttacggtgacaccgctttctatcgcctctcccaatccaaaccggattcccgtcaatccggttacttcctgagctgcattttgaatcggcgattcataatcggtaaacacacttgctcctttttctattatatatgtttcgcaatgatccgacaataagtgaaattcactatttttcagagattctatctgctcatcctctggttcctctttcgggaaaatgccttgtttcatctcttctacatgtcggacgaatgcctggtactctttttcatattctggcagacactgactccagtgtccatacgtctccccatttggaaatggaatttttctctgcggggtctgcatactgttcgcatacagatacgtcttgtctgtaagttccgccaaacatctgtaaatatccagactttccttcaagtcttctgctgcatcttcaagaatcgacacatccccttttaattcttcgttcattgtatatttatacatcaaaacttttactgctgcatctacttttttcgcataaacttcacaaatcatacgaattgcttctatatccgtaatataacgttcaaattcttccaaattacaggtaaccgcatctttcgcctgacagatctcccgtactgcttccgccgaaaatctcagaacgtctcctgtcatatctacaggagtttctccaaaatgtcgttccccttttaattctttctgtacatattcgtccggctgctctcccggagtggatacagatttccacaattcgtaattcgggcggtatttttttacattggtcagctggctcattgtcattccaagagacatcgtctgacgatttccctctgtaattccgatccgccttaaaatacgaggcgcacattccccgatgctctccagcgcattgaaaatatgctccgccgcttctctgccacacccaaaaaatgcatccagctctccgatccagtattcccgttctgtcttttcctcataatccggattccatgcataacgcatccatgctttgtaccacatccagtctcgatccacctgcttaatacgtgggttcgccttatctgcagcatatggccagtcccagaaaaacagcggatacagatgcagtccattggttcccaaacgatgcagtccagcctgcatacacttttgaataaatccaggcgctgcaaaccggaatggttccaaatttgccagaacatgaacattcataatatgggtctgaccatggacggtcatttctctgtgctttttctgccagtttccaaccggataataagaagtcagactctctccattaaacttccactgtgtatacagatttgaatattcttttaccgccttatgcatgatctcttctgctttgcaatcatgtcctcttaagatcagcggagggatttcttttagatcagcctgccgtatgccttcgttaaccgccggaataatcgtctttaagaaccagtcttccttgttctgatctcctctgagtgcctctcccagacataccataagaccaatgtgaggaaaacttttgataaactcaatgatcgattgatatgtataatctgccaccagagggttgatggaactctgcagaagttccaaatggtgcttctcggcaaacggaagcgggatatgaatgctgtagaattttaataccacccagattccccttctgtctgcttcttttgtcagccattcaaatacttccctgtttttctgaaattcttcttccgtcacttccaatgcttctggataccccggaacttttacaaaagacgaaaatggatgtccactccagatatacaaaacattgcaccgatcttccagcatcatatccagatattcctgccatagtgccttatcgtagaaccacgggaaccgatccggagtcaccgggtactcatatgtcagacgcggtggttccagttttgttttctgaagcccgataaccggtcctcttaatttataaaccggtgcatcctgaaatgccagcacttccgggatctttccttcttttcggattctctctgccagttccagacatccatacagtgctccggttgcgtcaccccctgaaacaaggcataatttgggtgcgatcacattcagataaaagccttcttcttttggaatttctctgtgatagatcagcagccctctttcttccagatcgatcaaatacgcagattcttctctgctgcccacatagatcttaacgccttccatctctcgataatcattcccgggttcctctgccacactggaaattccatatcctgcttcctttaacgctttttcaatataagaaattcctagctgtattcgattgttttccttcaagggctgtatgatcactgcctttttcattttcttttcctccatctaacattcaaatgttccctttacatctttccaatgcttttctgcataatccatcaatttttttgcatcttccataggcattggattaaaataaagcagcatactgtgagaaccatatctttgaaccagccgatccacattgcggatccagtcatccacatttcctgtatacaccttgatccacaaagattttcctgcccgtcttgccttatcataaatttcataccagtcttccagcgttccatccgggccatgatccccactggtccactgtaatgcatcaatttcttcaatttccatcaatgcatctacatgtttgattgcgtccggtccatccagatgatacagaacattgtctagcttttgagcctgttgtctcaaggaatctacaataaattcccgatattgtgtcggtgacatcatcgcagagaaatcacattgcagcttggcagtttttccttctccccaaatctgaaataccgtataacaagaagaatcatcttttgagtctttcaccaattcataaaatctgtcataatattcaaaataaacatccgtcacttcctgaattcgcttttccatctcctccggctcatcgatcagatcaaaaatcgtattctgggcacctcgcagagaagcaagaatatcgacattttccatcaggtccgggatcgcaacataaaaatcatcccctgccagttcccggcatctttttacaacttccatatgctttttaaaccatgcgttttccgggtcaaatttcaatggcccctcttcttcccaatcttccacacattctgtaaaccagacggtacgatcctgaaattctatatcagatcccaaatatgcagcgattgatcccggtccaaaatcagcactcatattcggaaaactttctcccaaaaattcatgattctcacaccagtgacgatagcttgcaaccatacgttccggattcatgtatttatcgtccatatcctttgacttcaattcctccggaagtggctctgcaccttctttttctgcaacaacgatcatcagcggccgtcctgtattctgatgtttccagtaatttctgaatttttctttcgtctcttcccaatttttcttatacttcatttctcaccctcctgcattttgtcggtttttcaattttctttgattttactaaacacaatttgaaaaatctactcgatttgagaagtggtgtcttttctgttactcttctaacaaatatgttattgtttcacttttccttatagtagactaataaaagaaaacagatattggaggtgtatatcatgtcatctgctacccgtaccctttttactggaaaacagctatgggcactggttcttccactgatcatcgaacaatttcttggcatttttgtaggaatggcggacaccatgatggtggcaaacgcaggcgaagctgccgtttccggagtatcacttgtggattcactcaacgtgttgcttgttgtcgtttttgtggcgcttaccactggaggatccgtcattatttcacagaatcttggcgcccggaattattcggatgcccttaaaaattcacaacagcttttattgtcaaccgtatccatctctctggttatgacaattattgctttcattggaaatgaatggcttttgcatctcattttcggtaacgttgctcctgatgttatgaaaaatgcaagaatctatttttttatccttgctttttcttatccatttcttgcaatctacaattcctgcgcggcaattttccgtgccatgggaaattctaaaatttccatgaccgcatctcttgtcatgaatcttttgaatgtctgtggaaatgcatggatggttttttactttcatatgggagctgccggggttgcgctttcctcactggctgcacgtatttttgccgcagtctttctgcttttcatccttcgccggccaggacacctcatctctatgcggacttattcgatccattttaatactttgatcatccgaaagctgttatatatcggtgttcccagcagtatcgagacaagcatttttcagattggcaaattattggtactgagtattgtcgcaggatttggaacaagtgctaccactgcaaatgcagtttccaattctctgtcccaatttgcattgattcccgctgctgcgatcggaaccgccatgattaccatttccggacaatgtattggtgcaaatgcttatgactccgctgtttcctacacaaagaaactgctgcttttgtcccacggcattctggcagtcacaaaccttatcatgttttttgcctgcccgtatcttctgcctctttacagcctgacaccggaaactttaaaaacagctgttctgctgatccgaatccacagcatcggagccatctttttgtatccggaatcttttatgctcaccaatacactccgtgcagctgcagatgtgaagtatcctatgatcgtctccattctttctatgtggatctggcgtgttggcttcagctatattcttggaatctatttccacatgggcgtatcgggtgtctggatcgcaatgctttcagactggctgtgccgtggcatttgtttcagcctgcgtttccgatccggtgtctggaaaacaaaaaataaatctttattggagggtatttaaatgtatacgatgtcttatttttttgatcaggatcaaactctgcgtatcgcaaaaggaaacgatctgttccattttcaggactgcaatcagaacgagccggttctggatcttcggccatttggaaaaatcatccgggatccttacattctgaaagatcaacagggaatctatcggctgttttttacggataactggtacagcaacaccctcggatacacgacctctttggatctactccactgggaacccgtaaaacatttgaaagtcatgggggacaatgacgatgtctgcaactgctgggcaccggaactttgttttgatcacagacggaatgcctggatgttgttctggtccaccagcttttattccctgaatacagacaaacggatctccaaccggatctggtattgtcatacagaagattttgagacttacacaccagcacaaaaattatttgatcctggatatcaggtgattgatgcctccatccactattataaaggcttctactatatggcgtttaaagatgaacgtggacacaacgcccctggtactcactatgctgccatccggactgcacgttcccgtgatatcaccggaccttacgaaaacatctcgcctttattgacttcatttcgaacagaaggccccttcctgatcgaagaagacggatggatgtacatgttttatgattccttcggagatgccagctacaagggaatgcggacaaaagattttttgcattgggaagatgtcagccaagagatgcagtttccaagtatgtgcaaacatttatgtattttccaggactaaaaataggaaaaagaggcactttttctgcctctttttcgtttgcgtataagctttattctacttttttcaataccagaacccagtccgaatgtccttccagacgcttcataggattgaatctgtgttcttgtcttccttcggtgtgtcccgcataactaaatactccagttaccggatccatccagtatgtgtcaaatgtcccttcataggattccagatttagtgtaaaaggatgtcctgtgtaatcatagcagaagatataatctgctcctgcaaacactgcgatccgctcatatcccttaccatcaccttctgtcaccagtttctgtgcagcgcaccccttttgatactctacactttccatcaagtgtttcaaatgccccatctgcataccgccaatgttgtgaagagcctctctccagtcctgccatacaccaaatgccccttctttttccacatctttccggaaaaactgcataattgcattgtctccaaatgtgtgtccgaatgccccggcaaatactgaccagtacgcatatcttcgcgtatcccatgactgccagtatggctgtgtatgatcgtgcagcccgtgtacgatctgttcgtaagacggttccccgtcaatggttggtttcaatggactttttcccagatccgcctgcacatatttccagttgtcttctccatactgatttggattttttccattgtcatcccatgcccccagtacgacctggtcgtatctgcgatgtccggactgaaacatattaaaatccagccaggactcttcctgaaaccactgagaagaagaggttcttccaaatggatggaatcccaccagatgtccgtcactttcttctttcagcctttttccgatatggcagaagacttccggcgccgcctcaccttttacgtcaccgcctaccagccatattacattctgtctggatccgaaacgctccaggagaaagtccagatatgcatctacatttcccatatgcagccttcctgcagccacatttcctccccaggttggaagaagcgccatgtaaaatccaagttcttccgcgatactgaccatatgttctgcacgtttccagtagccaccctccagatccggcgtggcatagtcttcattacaaagcgcattggcaccgtctctgttcttttgcggccattcatgaatcaatgtcgactggattaccgtatatcctttttcttttctgtttctcaaataaatctcagcttctgcttccgtcagctttgcaaacatcagccatgccgtatcacccagccagaaaaacggctgctccccgttacataaatatttttgattgtcgctgacacgcagttttccatattcccaggctttcattttttcctcttttccagaactcaatgttcttttctattttaaacgatactccatttcatgaagcttacgataaagttcttcttgttcttttgctgtctcacaatatgtcacggcaatgagcttcattccttttcgatacagtctttcaaatgtatttcctgcctctgcaccgactgcacgggcattcaaaataatgccgctccctgcaaatttttctgcaaatgcatccggagtattcggagacggatccgtctgaattgtaaatgctccatccgccataaaaattccattcatctgttttaccatggaaatcttctgttcccagtttccacaggaatgaaataccgttccgccaaattgctctcccagccactcatctgccggctgaaacagctctttataatcttcttctgcaatcataatgctgttatcatcgctgagcccgattccacggaacagcctgctgcttgcaaatccatgccccggagctgccagtgcatctccgatgatcattctttgcttgttcagaaattctgccagaagctttgccgaaagcattgccgcctctttgaccccgtccggatcgtcatacacttccataaacagatccgtaatcggcaaaagatatgacagcatattgatcggtgactgtacatctgtcaaagaaaccggcagtttcccttttgtcctgtccataaaatattcggtcatctccaggatatgctttccggccggtgtattttcaattttttcaggtgctgctgccagcagttcttccgtcgaatgaaatacagggcgtacagccggagcctgaccttctaaaaattcatatttgcccccaaagcatcctgcaatatagccgattccataccatggctccaggaaattggcaagatctgcctgatactccagacttttttccaaagcccccagctgcaattccagtgactctttccagtccctgcatttgtcatagaacacgccatctgcacggacacgtctgtacactaaaattccctcatctgcttccagaaaacgcttttgacgttcttttaaggattcttcataatctacatagcgttcaaaatcaaatttttcacaggatactggtgttacccttgttccctgtgaatctcgtttttcaaattgaaatactccttcttttttcatgctgttttccctgctttcctccatctgatcaccataaaatttctgtctctgtgccatcccagaccacttcttttttctgtacattttccttttcatggaggaacacacagaatctttttggatatcctgactctgtcttttctgctttcacatacaatttgcggcaggattcgttccagtggaatgtgatcagactgtagaccccattttcatattcatagtctgctccgttatcctcatacagctcaaagtctccatctgctcctgcatatacatgaagctcatccatcgctcccatcacttcggatgccatcggtatcactgcccccgcacggacaaataccggcatcgtatcgacatctgctttcaccgaaagtttctgtccaccttcataaaactgtccatcttcttccagataccagtctgctccttttggaagatatatctccatttctctggactcttgaagcggtacgctttccggaccatattccattggtctggtcaccggacagataagataagacgggccatacataaactcttctttgagttcttttacattctcatcctgtgcaaaatcaaacatcaggctgcggaacattgtataatcatctctgcatactttccatgccagagaataggtgtacggcatcattgcatagcgttttttgatatattttacgatcgtatcataatagatcgttccctgctcgccaaactgccatggctcccttggagtatctgttccatgagaacgcatcatcggaagatatgtggcaagctgcagccagcgtacataaagttcccggtatccaagatcatccacacccttttcaaacaagccatgccagaaccacggctgaggtccttccgcctgcgggttgttgataaatcttctccagcactccagcgttcctgtaaaaaatgcccctgcatccagtgtccagtacggtattcctgacatgctcatgctctgcccttccgcaatctgatttttcagcacatcccaggttgccgcaatatctcctgaccagagaatcgttccgtatctctgcgaaccaagagacccggatctggtaagatttgctactctctttttcggacatactgctctttggtgctcataaattccctgtgcatgtttcaacgcaaacaaattggattctcttgcatccaaatactgatttgtggaatcctttgccatctgataccgctcgtcgtccgggcgcttgactgcaccattccaatccggagtaaatggttccgtagaatcgcaccaccaggcatctgttccggcggcaaacagttccctctcacactgctcccagtataaatcccttgcttcctcatcaaaggcatcatatgtagacaggttcatcaaaagctttcctgccttttccatctctttgttattttctgtcccctgattcatattcggccataccgaaatcataaatgcaatgccttttttgtgaagctcttcgaccatttttcttgcatccggaaaacggctcttgtcaaaaattttatttccccactttccttcctcccaggaatgccagtccaataccaggcaggatactggtatcttacgtttttgaaactcttctgctgtagtcagaatctcttcctgtgttttgtaacgttcctttgactgcacgtatccaaatgcccacttcgggagcatcactgctttccccgtaagtgcacgtattcctttcaccagctcatcaaaacaagtccctttgatcacataataagtaaggtcatccaccgcatcaaacgtaaatgtcatgtttccatctttttcttcatatgtaaacatgcagcctgcgtcgaataaaattgcatactgtctggaagaaagaatgaccggcatgggaattttcatgttgttctgatacagatattctttcacattccggtaattatacactccattttcctgctggccaagtccgtaaattgcttcatcttcacaaagctgaaatgaaatttttccttcatatgcatctgccactttcacggtatctgcattttccacaaaagcacgctctccatcaatcgtcttctttgtcacgatcacgggggcatttcctgaaaacgtataacgaaacacttcctttgccgtaagatgaacttctgtttgtctcgcaaaaatcccctcttctgtctgaaatacaattttttctcctgactgttctgcacagatctgacatacgtttgtttgtcttgcatctgtttccggaagaatttgtgctcccggcgaatgcttttttccgccttcgtgatacacaactttcaaaatattcgaatcaattgcctgaattaaagcctccattttctatctccccctgctttccatcagcattgcaaatccctgtgcttccatatgtaccgccccatgaatctgctgatcagataccagatcctgatactgtcctggtactgatacctctgcttcatcctgtgtaaaattaatcagataatatatttttttcccttcatatctgcgagatactacttccacattttccggaacctcaaatggaattttgctgactcctgcctttttgctgatttcatccaacaattttgcaaatacttccggctctaatccggttccgacataatatgcctttccctttccaaaattgttttctgatatgacaccgcatccttttttataagtatctgcataagtaccgatcatcttcgcagttccatccagcagatcacaccagtaccggtctttgctctccatttcctgtccgtttatggaaattcggacggtggaaatacactctgaaaatacaggttctacttcctgtacagtcacaccgaacacatcctgcattcctgccggaagactttgagtatatcctacattatccccattctttgctcctgttaaaaaggttgccacaagatgaccgccattttccacatattcttccagtttttttcgatgcttctcttttaaaatgaaagcgcccggaaggatcaccaatttataggatgaccagtctgcatcataagacagcacatccgcacccacaccgttcttttcaagaaggtgataaatttccccacaataattcagataattgtaatccggatcattcactggtttgattctcaatgcccaatgcacatcataatctactaaaatcgctgcttcgttgataaattctgcttcctcatacggctcgatcttctttaacaatgccgccgtttcctgcatttcataatatcgccttctcggaatgccatccatgtctacaatggcatagttcagctgttctgctccaaacggaaacgttcgatactgaaaatgaagcatcagatctgccccatgtgccacagattgaaaaacagcctgtttgagcgctcccggattgggctgctgccttccagaaccgctgaagcgatgtcctcctccggacataaactccatgacaccaaagtgttttccctgtttgattcctcttgcaaatgcatacggaaacgaatccacagatgtatcgcgcaatccaggataatagtcaaacgcataagtatccagttcttccgtactcttataataatcaatactgtttgtggccaatccggttgcgttggtcgtcacaaattttgttgtatactctttcaaaatttttgtttgaatgctctgatactctatctggctgtcacttgcgaaccgctcaaactctaatcggaccgtcggattttcataaaatgcttcgatctgctgaatggctccaacctcaatggaattgaccggaatccggatctgcccgaaatgtgtatattcctgagaccagaaaatgccaccgcttctttcattaaacacttcgatcgtatggtatttttcttccaaatagttttggaactttttctgacagaccgggcaatggcatcgtccggttccttcctgtgccggttcattatcaatctggaatcccgctacatacggatgatttccataatgttttccgattgcctgtgcaatccgtgcagaatacttccgatacgtttcgttattgtagcaataatgtcgtcttccaccaaacggccttcggatccctctgttatccatatacaaaatgtccggatgtttctcgatcatccacgcaggaggacatgctgtcggcgtacagatgatcgtctggatcccatgttttccaaattcctccactgcttcatccagccagtcaaaacaatacgttccttcctctggttcaaatctgcaccatgcaaactctcccattcggaccgtgttgattccggattcgatgatgcacttgatgtcatgcctgtattcctccggctttttatgttccggatagtatgataccccgtatctcatctttttactcctttcccgtaaaatggatttccatctgttccgtctcttttacacattccttaagttgaattttcacgatcgtatctgcctcttttttcagattttccggaagcttgatctgaatctgtgtttcatcctgtgtaaatgaaagcatttctcctttatatgtacacgttaaaatctcatatgggattgacggaagtacttccgttttaaacttttccgtatccagaatgtgtaggaaaatctgatctccacggtatgttgttccatatacatgatcgaccggctcgatcgggccacctcttgtcttataaatagtatctccgttttctctgagccatgccccgatctggcacatacgttctgccacatcaggacgaatatgaccattcttatccggtcctacattcaaaagcaggtttccgtcacgggtcaccacatccaccagcatgtgaatcagccagtcaaaatctgaaaccggatcatttgccatccatccccaggaacatccactgcatacgcacatatttttctcccacggtactggtatgatctttcctgtgatctcatgagagccttcatcacaatagaaatttccttcccatccggaacgcggattcatgatcatcttcgggttgtactcccgtgccattttatttaatttgactggctcccagaaccaggaactggacgtatcacttcccttgtgtgccaaccagccgccgtcataccagagaatatcaatttttccgtagttgctgacaagctccctcacctgatcataacactgctttttcatcaaaagcgcattatctgcattggccggatcttcctctccttttggatcaaaatatcctgggaatctccagtccatcggtgaataatacagaccgactctaagccctgcctcccgggcacaatccgtatattcttttacaaagtcacggtgtgatgcggtgtcccagcttgtaaatttttgataacttccagggctgttccacaaggaaaatccatcgtgatgtctggtcaccatgaccatatactttgcgccaaactcttttgccagatcggtccactcatgcatatcaaaatcttccggacaaaactgatccgcaagtgccgtatactcctcccacggaatctgctcgttatggcgcacccactctcctcttccaagaatagaatacagtccccagtgtacgaacattccgatctttgcgtcccgccaccactgcatatcttcttctgtaaggttcagttcttcgcagcgcatcccgcctaaacttttaaaattaatggagctttttaacattgaattcagctctgctcctgtcatctctctcggtgcttttttctgttccataaataccctccctgaataaggaattccttccttgaatctcctgatagtccttatttgggattagtatacaaactttctcacctgctttatatagtaatctttcaaactttttgtatttttttcatattttttacgagaactacccgctgataagttccattcacccggattgttacctcctgatcttcttttgcagtcagcgccagttctttgatccgtccctgctcccaggaaaagtctgcacaaattccgccccttaacaaaacaccttttacttctccacactgccagctcttcggaagtgccggaagaaattccagatatcctccatgagactgtaccagactttccagcattgcctctgcaatcccaaaattcccatcaatctgaaacggcggatgggtatccagaagattaatcttgatacaatccgtaaaaagcctttttatgctttcccctacctgctctgcatcttttaatcttgcccaaaaacaagtgatccacgcacggctccatccagtatgtccgcctccgtatgcaagtcttgtctcaagagtttttcttgccgcctcaaacaatctgggggtttcctctgtgatttcatatcctggatgaagtgcatagagctgagaaatatgccgatgccccggttccatctcctcatattcttcctgccattcccgaatccgtccgtctcccgtcaacgcaatgtccggtaatttctttgcaattgcccggattttatccgcatcagactgggcatctgttaaaccaaggatctcacagccctccaggtattcccggaataattgtcttacaatttccatatccatcgccggccccatgcaaagcgcaccgatttctcctgttttcgagcggtatgtattttccggagaaacagacggacctgtgaccagtcgtccctctttcgtttctgtcagataatcttcatagaaacggattgcttcccgcatcacaggaagcgcttctctgcgcaaaaattcccgatctccggtatactgatagtgttcgaaaaaatgcagactcagccatgccgctccggtaggccatacaggcgatgcatcaaaaatcccttccggatctgtattcgcccagagattggtattatggtgtgcacaaaatcctctgcatccatataatgcctctgctgtcttttttccttttgggatcatccgtttcacctgggcaaacagtggaagatgacattcggaaagctgacatttctctgcgatccagtaattcatctcggtattgatattgatcgtgaattcacactgccagggcggagcatactctccattccagatgccctgcagatttgaaggcatcagacagtcgtaagaactggagatcatcagatatctggcatagtgaaacaacgtctctgtcaggtaattcaaatggatctggttgttctccttgacttcatttaaaagttcatccgttgcctcttctggaactttttgtactcccagagaaaagtccatacgattgtacaacccggaaaatatccttttatgctccatgaaaattgtatcaaatccgatatctgctgccgcttccagacgctgcagacaatgcgctcgataattcggatctgcaaaatcggttccacacgctgcataaatacatgcctcatgcactcccctgatccaggtaaaatctccgatcgcctctgcctttccttcctcagacaccagcttcactccggtaaaatagtgaatccctcccggaccacattctccataattgcaaaccgtatcttccgctatactttctgtatgctcttcaaaaggcttcctgctcatattgacagaaaatgtaagcccctccggacagtctgtccgaagccggattgccagtatctggtagttctggctgaccagatgttcccttgtataggtatatccgttcattttataagataccgtcacgactgcttcttccaataacagtcgtctttcataattttcaacgtttcctttgtgatgatacatgcagattctcaaatctccggccggctgatacggattcatgtatttgggagtcgatgtgatcgccatctttgccagaaactgggctttttccacttctcctgcaaataacatttcccggatttgatccaaatattttctggtatccggatttttcctgtcattatcccttccataccagatcgtctcttcattgagatagatcgtttcctcgttcactttccccatgaccatagctcccagtctgccatttccaatcggcagtccgtcatcccaatatcttgcaggtttttttaatttgatctcatgtctatttttgagcggttccatatagtttctccttttttaacgcctgttcccattctttttgataatatctgtttaattgctcttttcccagctcatctccttttttcagcatttcttgccagagctgttcaaactgttcttctgtttctgcataaatcatacgccatgacacttcttgcatcatttcctgcagatggtcttctattatctgcaattctgccggaagagcccccatcatatacactgcctgactccccttcacagtctttcccattttttgttttcccgtcccagttgcctcttcaatacctgactctgcttttgtcagacccagccactgaaagaccggcttatcttcttttccataaggatccgttccttcttttccctcatacagtttggcaacattctcaggtgcatagaaccagtttagaaactcgcatgcttcttttgctttttcactgtttttatggactgcaaagaaccaattttctccaacgggatttttcggtttctgatatagcgtcatatcttctgccacaagagcaacataaccatcactttgtatctcttctttggtttctgtctttccatattccccgttctgccattcataaccggaaaataatatctgaccattctgatacttttcctgtaatttttcaaatgtctgcgttctggaatccggatccagaagtcctctctgattggcttcaaagtaaaaatgaagtgcctgtttataaaaactgtcctcttccaagattccatgaatggtttgggatgctgcgtccactgcgaacaacggcgaaagcgtccctacatccatcccgtagtatccatataatgaagacggctgctgcatttttttatccgaccagtccgaacataaagaaaatccatataccagctcccccattgccgtcattgcctttttgtccatcatctgttctgctacatccaggtagtcctccaaccgggcaatctgtgggcatcctgctttttgatacgcatttttttgtaccatcggcatccagtaacacgcatctgtgccctgtttcccgacagatgttggaagaaaatacaactgctgttcctcccctccaaaattttctctataatatcgaaatgcatcttcatactccgaagcatcaaacacatctgaaagctcttctttccattcatccaaatttaacaacacatctgcacccaacaataattctgcctgttccatatcccggaagccaatgatatccggcagtgtccccgccgccagatactgctttaatcgtttttcatctccgtttccattggaataaaattccagacggattcccgtttcttcatatagtcgatctgcactttcacttttccaggttcccgtcatattcgtaccggactgctgaaccagaattgtcagtaccgtatcttccttcttcttttccgtatcgtgattctcccctgcttttgtacaccctgtcaatagcattgccacactcaataccactgctgttttttgataaaatgaccgcataatattctctccgtttctcattctttttccaatctgtaactctttcgaaaccttgtatttttaattttctattgttataatactctatatcttttagaaataccagtcggaggaaaatccctatgctcaagcggtttcgaaatagttactactcaaagatcatgattgtatgtattgctgcagtttgtgcgatcacagccatcctgctgcctgtatgcagttctttgattcatcagcaggagctttcggaagacttaaaaaaatacgatctgattctaaaccgactgaccgcctctatgtcttcccgtcaggaagctctcgctacgaatctgactcccattttctctgatgaggcaaactatcaaaacctttgtaacttctatcgtgcccacagcaaaaaggtccctttggaatatcgggacagcgtcatggatatgctcaattccttctgcttctccgattcctactgctgtggtgctctgcttctaactataaccgggcatctttatcagtataattctctgtctcatactctgatccctcttcagcttcgatcgctgactacaggactgactccttatgagctccagatttttacggatcaacagctgatgacactgagcaatgacttacaaaaaccggcgtctcatatctacgggttgggaacttctgtatttgatcagaaaaacggctcggtaaactatctcggaactatgatttttctgtattcaaccgcagaatatgaaaaccttctttcaaatgccgacttgcagaatggaggttccttttacatactgaatcaaggaaaaaacattattttttcctctgatgaaaattacaataccaccaaaggactgctcatcaaacagccctcaaattcaaatgcgatacattcttctttcagcaaaaccatccatggcaccacttattatgctgccacgcagtacaatgagcagtatcgctttttttcgctttatcagattccagaatctgtattcaggcacaatacgatcattaccattttggctgtaatctctatttgcatctgcctggcagccattttgctttacattgttgcattctgtatctctgaccggaagattcactctatccagcaggccatgggacggattggtacgaacaatctggactaccgccttccggttcctaaaaatgatgatgaattcacacaaattatcaaaagcttcaaccggatgtgtgatgatttacaacgcaatgtggaaaaggcttatctctatgaaattgcccagcgaaaagcagaactttatgccatgcagactagcatcaacccacattttttgtataatgccctggaacagatccgagtacagattctgaagagcaacagcgccgcagcttcacatatgctgcttttgctctcaaaaatgtatcgaaaccagacacgccgtaatctgtatatcaccattgcagaagaatgcagccagtcagaaaatctgatcaacttttatatgtatcgttatggcgactttgaatatgaattcaatattcacagttcgattaaaatatatggcattcctaaaaatacactacagccattgatcgaaaattattttgttcatggttttatcccggattgcgatgaaaacctacttaccatttctgcgtctcctgtcaaaattcaagatgccctctggattgaattctgtgtagaagacaatggttcttcgattaccgaagaagaattagcagttttaaaggaaaaacttgcggcaccggttctaagccgaaatgaaaataatggatttgcactttccaatgtcaaccatcgcttaaagcttgtctttggcaacgattctgggcttctccctggagttggttctgacgggactggattttccgtacgatttcgaatccctgccattctcccgcaagatcttcaaaaatcctgaaagcgtgtttctttcatttgaaacacgctttctttttatacacaatgtaattttcgatattcaaatacgtgcttccaatcatctctgctcaaataatgtgtaccctgtcttaaaaaatatccgatatccccttcatgactgcattctcccggtcttaaatagcgatcctgctgatataatccggatcctcctgcacattcgaatgccggacttgccgccaggcatcccagaaactctgactttggatctgcccattcatctctggaggcgctggttacatacaaatgtctccccgccatcatcgacagtaaaaagtgtgcatcaaatggtaatttttctattgcatcccgatactggaaaaaattccccgcaaaccacaatcgagatccttttccatagagatctcccatctgttccccggtctttccccgaaacaatgccgcccctccggcgccggactgacagctgaccgtcaaagaaaagcgcagatcaaatgctcccgcaagcaatgctgcctttcccagtctggaatgtcccatgactgccgcctgttccagatccagtcttgtatcatccgagagaacatcccgtattctggacatacaccatgcccagattcgaagctttccccaactgtcataagggtttctggtacagaatcttccaagccccgtcatatgcccgtcaaaatagtccgctgcaatgtcctggtagaaaacatttgcaatagcatacccatgatcaatcacttcttctccgattccatctgcaacttccggcgtaaaagccaggtagaaaaatatcggaacttgtactccttttttcggaacagtcagcgtaaatggaatcgatgctgcagaaaatgcagatttaattttcagttcatagtataacgtttctgcttttccaccataactatcgctctctttccttaagatctctttttccgcttgaaaggaaagtcgtgtgggaaaccccgcaaattccctgcttaagatttccccaatctcctgtcttcttttttgccactgtttcggagtttttacctgttccttatgattttgccgcatcagttccggaagatttcttcgatgcagttcctgttctaacagattcatttcatcactcctgttccagaagatccagaatcaattcatccagaccgatattgtatccaaccctgccttctcttgccagagaacatagaatcaaacttccccctgctgccgaacatttttttacaaatgcacggtgaggttttgccccgctacttccctgaaaaccacttttatcgtaagtatataccatagtttctcctggaaattctgtctggaatgtgtaatccgctgtggcatcgatatattctttctttacattgtacagcatctgcagaaaatacgattcatatgttccatctgcggaggcaaagaacagatctccacaggactttatctcaatttttttatccagaatacacaattcttcctgtttctccggaagcatccaaatcgcacgtttccctttctgaagatgttcttccagccgttttatatcttcttcattatctccgctgactaaccaaatttccgaagtatcatccgcacgttctccctgataacattcccgaatctcctctgcctcggatcccaatgtgtaaatacttgttttcaaagttcttcgtttttgtacctggatttcgattttttcctgatgaatcagcctgccgtcttttgtaaaaatagctgtctgtactgtcactgtccttcttttccctgttgtttggaacgacactggtatcacacccgcacactgtgcatctgcagcagcaatatcgaatttttcctcatacatggcatacggaacgtcattgcctttttcgtatatttctgcatgaatttctatattgtttctatcactttcatcattgagaatccaaacttctaccggaacggtctcgtcctcatatgcactcattctcgccgtatacaaatttactttcaatgggatcagcgcttcctgataagaaaaatatgccggttttggtgtcctttcacaatccaccagcgttttcatccatccagacggccatgcatcgatcaacagatgaatggctgtctgattgatcacatccgctcttctgcggaatgcatccgtcatcagctttgttgccctagcctggtgtttctgactttctcttacccagtctgacatcgtgtgctgctctttgtaccagtccccctgtacagaatgtgtttgtgcccgcacgatctgatcgggataccagtctccgtttgccttacactgcagccattccttgggataatgacgttccatcaagtccaccggatctaaaccttccgctccatattctccacatcctatcatccatccctctttcaccggaggcaggtatcctctcataaggcgtccgattggttccccatgattggtgtaccacatcgtataggtatggaaatccggcattccttccaatgttgggccgtcataatctccctccacatttttgactacacggtcaggattttgtacatagattaccttccttgctgccgcaaaaaaggcttccaattcatctcgaagaagatgacgatgtccctttgcttcataacgccttgaaaatttgtcctctggattttctgtttttctgatgcacatcggctcattgatcagcgtcaccataaccgtagaaacatgatgtctgaccagatgctccatttcttccacctgacgaagagcttcacaaagctgaggtcttctcaaaaagccaaacaaaggaaaatcgcattgatgcatcattcccaacatatcacaataatcataaatctcctcctgaaccggacgttgtgtaatgcggtaataattcatatgacacaatttcgcaattagaatatcatcgatcagctgatcaaaatcttttttcatcacacattgctgtaaatgccccatttcatttgctccgcgcaatatgattggtttcccgttcaagaaaaattttccatgcggaatacttgtttcatcacttcggaattctttcaatcctgttgtctgaacttttgcactgagagtgatgcctccttttttcagaaacacctttgtcccatacagccatggcgtatctggattccacattctataagcatcaatggaaaaaaagtaacgatattcattttttcccggtcccactgctgtcacatgcttttttaaacttccaataacttctccttcatagtttttcggttccatctcaatctggatttccatatccttgtttacctgattggtataattaatcacacccacacgaacttctacagaatcttttgaaaaatccggacgtacaaaaatgtcgtctacatatatttctggtcgaagctccagactgacagttccgaacacgcctgctcccgccggacaatgatgccatccaatctgtggatcatcccatcccggaccggttgctgcataaatcttgtctccgtccagaaattctccttctccaagaatcggaatatcatttttacacaaaataataagttcgttggtttctcgaacatatttcgtggcatcgaaagaaaatggtgcaaacagcccttcatgacttcccacataatttccgttaagatacacttctgcaatatagtccacacactgaaaagccaaaatcatccggctacctttttgacactctgactgccatccttccggacaaacaaattctgtccggtaatatccttcccattttccatcctcctttgccggcccccggtaatccggaattgtaaccgtttcccatgcttcttcccaatgattgcggtctgtaaagcattcctctttttcgcaatagcgaaaagaaaactggtgcaaagaaagagtcggtgtctccattggaagattggagagatgattcgacataaacggtttgtaataggctttcatgcgctccaattctttataaaaattctctttttgctcttcataactgatttctcgaattggttccagtctttttctttgtgtttgtttcaggtaatgattcggaagttttcgcatgctgatctctcgatctgttgtcccggcaggatgttttgtctgcgcaatctcataaaaaaaatcgttctgtcccattattttctcctattctcaaaaaatcctccggccaaagccggaggatcctacttcattgcttatttgcctgcagcctctttaaactctttctgaattgccttgtaatctgatgaatttacaattccatccacaaagtccttccactgctgttcatcaatctcacccattacatactgtgtacacatggtattcacatcgtctgtcaacacactccactgattgttatatgtttctgactgaaggttctgaatttcatttttcattcccgttttttccaaatcactgtatacaaattctttcagttcttctgctcttgcaatgctttcatccgaagctctctttgcaccatcacgtttgaatttgtcatctacctgattctgatctgttttcaggaaaatctgattccatccgcctacatatccctgtttgttcagttctcccattttcggatccgatgacgtatccatcgttccatcttctaataatttataattgaccccttctactccaaatcgcatcaggttatcatatccaggcaacgtttcttctgtatgattgaatacttccagaattttttcaattttttcttctgaacatgcagagctgatcgcaatgcaggaatcaatatctgtatagttcggtgatactgtataagcctctggaccttctaccggcatcaaacaccatgcctcatacgtatccggtgtgttcttatcaaacactttgttgcttgtcaaatctgctgactgattccagttataccactggcacagataagctacagagtttccagctttccatttcgatgtgtctgcatttccaagtgcgaattccttatctaacacgcctgcttcatacagatctctcatccagttcagaaagtcaatatatttttcatcaaactgcatatactcaaagtcaccatcttcattgacttcccaatcggtctgtcctgtaaatgccgttgcaaatgctttcacacgatcatccatgaatccatttcctgcgttgtcaaagaagtccaatgcatatactttcttgccttctccttctgttgctgcttttgaaagcccgatcaaccattctttgagttcatccatggtcttgggttcttctgtatatccatatttttccatcagatcttttcgaacttcaattcctgagttctgacctttttcggccttacttcttggaagaatataaattccatcattatatgttgcctgatcccagaaatcctgatcccagtttttcatcacagcatttgtttccgcgattccttttccatcatcaaataagtatttgcttaaatccacgaactgacctgcatcaattgcctgtgtcaaaatcggataataataggcaccgcctactttattgatctgtattacatcaggctggctgtctgccgcgatcaaagtattcagcttctgatcgtagtcctgatagctcacccattcaatatccagatctacgtccatctgttcttcccagtactgctccatctggctgttcgaaacagcaccaaatccccagtcaattcccataacagaaatggtcattttcccatctttggttgtctctgttttctttgtttccccggctttctccttggcatcaccgcctccgcatcctgtcaatgctcctgcaagcattaccgctgacagacaaagtgccaaaactcttttctttctcattttttgtcctccttttatttccaactgcttcttgcagctgattttatgatacttttacattatccttttacagctcctaccatcataccagactggaagtatttttgtaagaatggataaatgatcaaaatcggaatgattacaacaacgacagctgccattctcataacttcctgcggaactgttgttgccagttctgtcgataagtctacaacgtctgccaccgtagaggaaagtacgattttctgtacatatacctgcaatgtctgttttgcagtacttgtaatatacatcacactgttaaagtatgtattccagtaacttacaaaggcaaacaatgtcatcgttgcaagcattggcttggacagtggaatcacgattttgctgaaaatcttcagcggtccacatccgtcaattttggccgcttcttccagttctatcggaagtgactggaaaaatgaacgcattaccatgattgtccatgcaccacacagtcccggaagaatcagagcccaataactgtcaagtaaatgtaactgtttcatattgataaagtttggaaccataccggcactaaacaacatggtaaacatgacatatttattgataaatccttttcccggaattggttttgacaacatatatgccaaaccagaacatacgatcacactcaacggtgttccgattactgtaacaatcaaagtggattttaatgcattcagaaatcccgctccacttaaaatcaactcatatgcttccgtagaccacttctttggccagagaatcagttttcctgcttcatatgctgtagaatctgtaaatgaaaggattactacatacagaaacggaagtaccatcgtcaaagcaacaataatcaagataagccaaagtgctgcctgataaatattttccttcgctttcattcccatcttctttttcgtggttgtgtttttcacagtgactacattttgggaagtcatgtttccccctcctttctactacataacgccttcatatcctttgcgattcgcaatccagtttgtcagtattacaagtccagtgttgatcacagacttaaagataccaattgctgtagagtacgaatattgtgtgcttccgctggcaatactattattgaaaatatatacttcaaacacttccagctgttgttttaccatcgcattgttcatcagaaatacctgttcaaaatccacagaaataatggttcccattttcaagatcagcataaccataactgttggcatgatacttggaagtgtaatcttccacatacattgaaatctatttgctccatccattttcgccgcctcatacagactctgatcaattccggagattgctgccagataaacaatggagccccatccaatccccttccatacggactgtaccaggatgatcacataaatccatcccgaactgaacatataagcagtcggctcttttcccatcatttctgaaatcttattcacaagtccctgttctgtagacaacaggaaaaaagttaaacttgctacaattgcccaggaaagaaaatgtggaagatataccgatgtctggatcaatttcttaaatgctgcatttctcacttcattcatgatcagcgcaaggatgatcggcgcaggaaatgtcaataaggaaagtccactgataatcagtgtgttcttcaacatattataaaatttgggatcctggaacaaagtttggaaatgttcccatcctacccatggactttttaaaagtcccaaatgcggattataatcctgaaatgccataagtaagtttcgcattggcagataattcataaagaataaaaggacgattcccggaattcccagaaaataaatccaacgatattcatacattcgctgccgtaaagacttattcgtggctaccatttttgttttgttcttagccatttacttttcctccctattttcattcgcaaccttttcctattcgattctatttgcgttttctttaataaaagtataagaatttttatattaatttcatatagtaaacattcaagctttttgaacaaattctaaatatcttttaaaaatttagtactttttctctttatttgctaaaacgtttcgtttcattaacacttttcgaagattcttcccacttttgttggcactgctttccaatccgttgacttccttttctcttctcttttatactagaatctagaataagtgcaaaaatatgaaattcgttctatttttattattttaatcggaaggggaattttaaatgtatcaggttgttattgtagatgatgaaccttttgttctcgaagacttgaaaaaggcaattgactgggaaggctccaattttgaaattgcatatgcagatacagatccagtacgtgttctttcttatattcagtcccatacgatcgatcttttgatcacggatatcaatatgccggaaataagtggacttgccttgatctccaaagcgaaggagatccaaccgcttttatccgttctggttctgtccgcctatgacaattttgaatatgtacgtaccgcactgcgcaatggagccgaaaattatttattaaaaccattaaatccggaagaactcttggaatccattcaatccgtttccaagcatctgaaagaaagaaatacgctttcaaatacttatggttcttccatgctgacattccgtagtctgtttacagaaaactgggtaaagggaactctggacagtgccgattttctgacccgtgccgaactgcttggcatcaatttgtctcttgataattacaccgtctgcattttttcttctattgatgcagatgcacagaaaatgtcttctttatttgactggcttctggcctcctgtattggaaaatttcagagccacttctatttcgagacacctacttgccttgtatgtattttaagcagtactgattcagcaccggatatggaacagtttctcagtgatcttaatgctgtacgcgctctgttcccattctctttttttgtgtctgttggaaacactgtggacaattacgaagatgtcagtgaaagttatcgtcatgcacacagctatctgttcctgaagtatacagaaatgaaggatttgatctgttcaagccttcttctcccactagctatgcacacggtaatcgagcagaatttttctacggtttctttggatctttatttagcacagatactggatatttttactcctgcacttgatcccagaaagcgtatggcatttcagctcacggtgatcaatcacggattgtctcagataaattttgaaaaaaaacggcagccacagctgctaagtcttttaaaagaaattccgggaagtggaaaatattttcatgaaatccaggcatacttaaaacaatttatttccacctgttatcaggtattggaagaacttcagtctgctcagagcagtcagtacccttgtgttgatgtcgtcatcgatgccattcatgaattttcaaacaaagaaatttctttaaagacacttgcttctcaattgaatatgcatccgtcttatcttggtaacattttccatcaacagactggatactattttaatgattatctaaatgaagagcgtctgaaatacgctgcagaattgatgaaagaaaccacattaaaaatgaaagaaatcgtggataaatccggattttccagccagacctacttcaatcggctttttaaacgcaaatacggaacatctcctctcgcctatcgtcgtgaaatgaaaagtaaagatatttccggatgatggaaatcctttacagacagaagcttcccattaggaggtatattttgaaatatataactcctatggaaagcttctttacttttataaatttttgtacaattctctgacaaaatatggatttttgttttatctgtaaaattctttcacaaactgcacaatccattttttctaattctccttaaacgattttaaaaggagacgctgcccctatcttcatctatagggacagcgtctctttcttttattccaattctgttttcagcaaagaattaatcttcttttgctgtaccatcatagagatttaccaatcccttcaagtattcatatctttccatagcctcagcctcattctgagcgaagagtctctgtgctttctcaggatttgctctcatcagcgcattgtaacgaacctctccgttcaggaattcctgataatctcccttaggctctttgctgtccagagtaaatttcttttcagcctgtgggttgaatctgaagttattccagtatccacattctacagcaagctgttcctctgtctgtgctttgctcatacctttcttgattccatggttgatacatggagcataagcaatgatcagggatggtcccggatatgcctcagcttctgcgatggcttttacagtctgattgaagtctgcacccattgcaatctgtgcaacgtatacataaccatagctcattgcaatacctgcaaggtctttcttcttcgtctctttaccaccggctgcaaactgtgctgtcgcacctgtcttcgtagcttttgaagactgtcctcctgtgttggagtaaacttctgtatcgaataccatgatgttgatatcctgaccgcttgccagtacatggtcaactccaccgaatccgatgtcgtaagcccatccgtcaccaccgaagatccactgagatttcttagcaaggaagtccttattcttcagcagttctgctctttcttcgcatccgcattcacagtcttccagagctttcacaagcttgtctgtagctgttccgtttgtcgcacctactgagaatgtatccagatattcctgtgctactgcttttacatcttcattttctgcactttctgcaagtttttctacagatactttgagtctctcacgaattgtattctgtgcaagaagcataccatatccaaactctgcattatcctcaaacagagagtttgaccatgccggacctctgccctgtggatttactgtataaggtgtagatggtgaagagttaccccagatagaagaacatcctgtagcatttgcaatgtacattctgtctccaaataactgtgtgatcagttttgcataaggtgtctcaccacaacctgcacaagctccggagaactcaagcaatggctgtttgaactgacttccttttaccgtagtctctttgaattttgcaacaacttccggtttgatcggaagctctgttccataatcaaagaatgtctgtcttccggcatttgcttccatgttgcccataacaagcgctttttcacccttcttaccaggacatacatttgcacaagatccacatcctgtacagtcataagcagatactgcgatcgagaacttcatgttcggcataccgatcatgtcgatcatatccataccttccggtgcgtttgctgcttcttcttctgtcaaagcgatcggacggataactgcgtgcggacatacatatgcacagcggttacactggatacagttatctggctgccagatcgggatatccactgcaataccacgtttctcatatgcagaggaaccggatggtgtagaaccatctacatattcgttgaatgcagataccggaagtgaatttccttcctgtgcatttacttttgcctgaatattcttaacgaaatctacaacgtctgctcttccgccctctcctacatgaggtactgcaagaccttcatctgctgcatctttccagctctccggaacttcgatctcgacaacctgttttgcacctgcatcgattgcatcatagttcatctgtacgatcttgtcaccttttcttccgtaagtagcttttgcagctgctttcatcagatcaattgcttcctcttccggaatgatcgctgccagtttgaagaatgctgactgaagaactgtattgatacgtccgccaagaccgatttctttaccgatcttgataccatcgattgtgtagaatttgatgttgtggtttgcaatatagctcttaacctgtccagggaggtgttcttccagtccttccatatcccatgaacagttcaaaaggaatgtacctccatctaccagttcctgaaccatgttgtatttgtcaacataagaaggattgtggcatgctacgaagtttgcctgacggatcaggtaagtagatttgatcggagacttaccgaaacgcaggtgagacattgtaacaccgccggattttttggagtcataatcaaaatatgcctgtgcatacatgtctgtattatctccgatgatcttgatggagttcttgttcgcaccaactgtaccgtcagctccaagtccccagaatttgcagttgatcgttccttccggtgttgttaccagaggctcatctgctttcagtgacaggtgtgtcacatcatcctcgataccgattgtgaactgatgtttttcatcattgtgatatactgcaacgatctgtgccggtgttgtatctttggaacctaatccgtaacgtcctgtataaaccggaactgcatcgaattttgttcccttgagtgctgctacaacatccagatataatggctctccaagtgctcccggctcttttgttctgtcaagaacagaaattctcttcacagaatccggaattgcatcgatcagtgcctgagcagagaatggtctgtaaagacgaacttttacaactccgactttctcgcctgctgccatcaggtaatcgattgtctcttcaatcgtgtcacagacagaacccatagcaacgatcacatgctctgcgtcttctgctccataatagttaaacaatttgtaatctgttccgatcttcgcatttactttatccatataatcctgaacgattgctggaagggcatcataatatggattacatgcttctcttgcctggaagaaaatgtccgggttctgagcagatcctctctggcatggatgatttggattcaatgcatgtgcacggaactcatcaattgcatccttatttactaaatcttccagatcttcataatcccaggtctcaatcttctgaatctcatgagatgttctgaatccgtcaaagaagttgataaacggaatctttccttccagtgctgcacagtgtgcgaccggtgtcagatccataacttcctgtacgctggattcacacaacattgctgcacctgtctgacgacatgcgtaaacgtcagaatgatctccaaagatagaaagcgcatggcttgcaagtgcacgtgcggatacgttgaacacacccggaagctgctctcctgctactttatataagttcggaatcatgagcagtaatccctgagatgctgtaaatgttgttgtcagtgctcctgctgcaagagaaccgtgtactgctcctgctgcacctgcctcagactgcatctctgttacatgaacagttgtcccaaaaatattctttcttccttctgttgcccactcgtcaatatgctccggcataacggatgacggtgtgatcgggtagatagctgcaacttctgtatatgcataggaaacgtgagctgctgcctggttaccgtccatggttttcatttttcttgccatttcttgttcctccttcgaaattacattgtaaaacgagtttttacatgtaaatttattatatctcgattatttgtaaaagtccatacaagcagtctcatttcttgtttcttttttggtacagttgttcataaaataagaagtatcttcacataatgtcgattttccaacacataaaaagaagaaggtttaaaacccttcttctctccgtttcattcgcatttcccttctctttttggctgcatcccattcccatttttcttcttccgtttcgatcagaagtcccgggatttctgtcggcttatccttttcatccagcgccaccatcgtaaaatatgcccggttgatcggtcttctcatcccgtctttgctttccacatatgtgtcaacccgcacttccatagacgtctttcctacataagtcgccttcccgatcacaaccacgacctcatctaaataaactccgtggataaatcttaagttatctacagaagccgttgtaatattgtgttctgcatgacgccgtcccaccagaccggccacttcatccagccattccatcaactggcccccaaacagtctgccggctccgtttaagtgaacaggacgtactgcatgcattgtttccactctggaatcactgactctcttttcttttctcatatcctcttcccctttttttgcttctcattaccatgcatgcagccagaattttcctaaaaaccagatcagaaatgcgaaaatcgcaagaactccaattgcaaccggaagcagaagttcacaaaatgccagaatcactgccattttatccttcctgctcatttcaatccattctgattttttcgaattcttgctttctttccgcgcttttttctttgcttcttttctgaccgtgcggattcctttttcgaattgcatctttttcttcggttcttctgactgctcttctgtccttttttctttttccttctcttcaaacatcagatccggccttggtccctgtcccagtttcaatagatttttcataatgccctctttgaaaaatgcccccgatacaatgaccaggggcgtagttatattctagtttctgtattgccaggtattttatacataatggcaggctacgaaatgctcatctcctacatctctgtattccggtgcctcctgtgcacacttctctgttgcatatggacaacgtgtacggaatttacatcctgacggcggattcgatggagaaggaaggtctccgctcaaaatgatgcggtctctctttcttgttggatccggcaccggaatcgctgacatcagcgcctttgtatacgggtgcagcggattgtcaaaaatctcattcttatctgccatttccacaatatttccaaggtacatcactgccacgcggttactgatatactctaccacagacaaatcatgtgagataaaaatataagagaaattatttttctcctgcagatcgccaagcaagttgatgatctgtgactgaatggatacgtccagagcggataccggctcatcacagacaatcagctccggattcagaatcaggcttcgcgcaataccgatacgctgtctctgtccgccggaaaactcatgcggataacgattgatataataagtaggcagtccgcagatctccattgtctccaataccttttcacgagcctctgccttgctcatcaatttatgatcgagcagagcctctccaataatatttccaacagtcatacgtggattcagggatgcatacggatcctgaaataccatctgcatctgcagacgcttctcacgcatctcttttctcgagcattttgccagatcttctcccttaaagattacctttccatctgtaatatcgtgaagtcttaagatcgttcttcctgctgttgactttccacatccggattctcctacgattcccagtgtctctcctcttctcaatttaaaagaaattccgtcaactgcttttacatgtccaattgttcttgtgatcagaccaccacggattgggaaatattttttcagattctggacgtccaaaatgacttcattttctctgttcatttatacttcctccttttccggtgcattcacaaaacatgcaacataatgtccatttccgacatgtaccagttttggttccttctctttacatccatcctgacagaactcacatctctcattgaaatgacagttttccggcatattgatcgggtttggtacctgtcccggaatggaatacaatcgttcgttatgatttgtctttccaataaccggttttgactttaacaaaccgatcgtgtaaggatgcatcggattctggaagatatccagtacttttcctttttctacaacatttcctgcatacataacaaccacgtaatctgccatctctgccacaacaccaagatcgtgtgtgatcagcatgatggacatatccagttccgctttcagtttccgcatcagatccagaatctgtgcctgaatggtaacatcaagcgccgttgtcggctcgtctgcgatcaacagcttcggattgcataccagcgccattgcgatcatgatacgctgacgcataccaccggaaagctcatgaggatagcactccataatctcatccgctctcggaattccgaccagtttgatcatttccagagcttttactcttgcttcttcttttgttgcatttgtatggaagagaatgctctccataatctgatgtcctacttttaataccggattcagagaagtcatcggctcctggaaaatcattgcaacatcttttccattgaccttctccatctcactcttactgtatttcagcaagtcttttccttccatcagaatctcaccgtccacgatttttcccggaggtgactgtaccagatgcatcaaagaaagtgcggtcacactctttccacatccggattctcctactacacagactgtctcgcctttacggatctcaaaatcaacgccattgactgccttgacaattccagcgtctgtatagaaccatgtatgaagatttttaaattctataaatgccataacttttctccttgtcaaaacttacttagcgtttcattttcgggtcaaatgcatctctgagaccatcacctacaaggttcaccgcaagtactgtcaataagatacagaatcctgccggcatccacagccacggacgcagtttgaatgtcatcagattggttcccgcagataccatctgtccccagctggacatcggcggaagcacaccaactccaagataagacatggtagattccatgatgattgtatcaccgattgccaatgttgcagttacaatgatgatcggaataacattcggcataatgtgtttgaagatcttatgcatatcacggatacccagagattccgctgctgacatatagtccatctcacgaatggaaagtacctgaccacggatataacggcaggttcccgcccatccgatggctgcaagaatcaccattaaatagtatacacgaactcccgtatccactttccagtcagacatcatcgcactgagcatgatcaggatcggcatcgttggaagagacagaatcacgtctaccacacgcatgatcacaaaatcaacaactccgccatagtatgctgccacacatcctaaaaatgcaccgatgaatatctgaagtgctgttgccgccagaccgactgtcatggaaatacgacctccataaagaagacgtgtaaagacgtctcgtccattttcatctgttccaaaccagtgctgtgcactcggcggctgttttgcatttgcaatatcagttgctgtaatatctgaatacggagatacgataggtcccacaatacaaagaacgatcatgactcctaaaaagatcagtcctgctattgccagtttatttctggacaggcgcttcatcgcaagtctccagggggattccatgctcttgctcgctactgcctgttttgcaattcttttatttgcatcttctgtttttttcacgtgtcctcctcctttctacttcaaacgaatacgcgggtcaaccgcaccatataataaatcagaaagtaaatttccaagcattgtaagtactgcaaggaacattgtgaatcccatcataaacagataatctctctttccaatcgaatccaggaatactttaccaattccaggccatgcaaagacagtctctgtgatcatcgcacctgcgaaaagtcccgggattgcacctccgacatatgttacgatcgggatcatcgcattcttcaacgcatgtttgtaaattaccactttttccggaagtccctttgcacgggcagttctgatgtaatcctgattgattacctcaagcatggatgtacgcacataacgcatagtgccacccaactgaatcactgtcagtgtcacaaccggaagaatcatatgaagcaatacatccacaacataagcccccccagtgttgtttgccccagcagtcaccatgccatcaagaggaagcacacccagcttgatggagaacacatgccgcaggatcattgccaggaaaaaggatggcagtgaaataccggcaaatgccactactgaaaatgtattgtcaaaaatcgaatattgcttggtcgccgaaataacgccgattggaatcgcgatcaatagttgcagtatgaatgctacagcagctactaaaaacgagttccatacaaatttaccgatgacttctgttaccggaatcttgtaactgatcgagataccaaaatctcctctgattgcatgacttgcccagtttacatatctttccggtatcggtttgtctaatcctaaaagtgctttgttctgcgctatcttctccgctgtgatgtttccgcctgcatgagcatcaacggcatctcccggcagacttgccaccaaaaggaatacaaccatagatacaccgatcagaataggaatcatcgtgagaacacggcgagttgcatatttccacatttgttaaaaacctccaatctttatttgactctgttttgctcatgatcaaataacttaattttgcccgcaggaaatagaacgaatcgagttcgtatccaccccctgcgggccgtttgtttgaagggaaacctcgctggatccctatttgagcttcaagtcttacggctttgttatttttttagagtacttcgattactcaacttcaatgttgacaatcttatcctgctgataccattttacatatgagctctgctcgatgttctgtacacgagtgttgtagcagatcaggtcacatctctcgtaaatcgggtatgtcggaagatcttcattgatcagtttgtaaatttctttgtatttttctttctgctcttctttcgaagtagaagccagtgcctctgcgagcatcttgtccagttctggatttgcatatcctgtgtggttctgagatccgcctgcttccggacttgcaaatgttcctgtcagatctggatctgctgtcagtccccatgccatgaacagcatatcaaatgtaccgttctgagatttagactgcagtgtcggccagtcaacatactctgcctggaagtcgataccaagctgtccgtatgcgtcgatcatcagtgggatcatagtatctgttacgatgtttccagacattgcactgaagacgatcttcatctgttttccgtctttcatcagcttgtcgccatctttttcccatcctgcttctgccagaagttctgctgctttgtcaaggtcataatcgtatgtttccagaccttcgtcatcatacaaccatgagatcggtgcctgtggaatgttcagtgtaatcgcatactgtccgtaaacagcctggttcagagacttacggtcaattgcatgaagcagtgcctgacgtacttttgcatcctggaagatttcatttgcatgatttactgcaacatatccatatccaagtgttggctggatcttcatgttaatgaatcctgctgacattgcctcttcgatgtgatcatcatcacatacaacctggtcgtgaatatctacatcaccagtctctactgcctgaagttctgcgtttgtagcaactactttgaagatcaggttctttgtcttaggctctcccaagtagaagttcgggtttgcttccagagttgcagatgttttttctttgtactctttcagtacatatgcaccattggatacataatcaaccatgttcagcgctttgaatttagaaacatcaccttttttgatcaggtcgccatattttgctgtagagatcggcactgctgagcccaatacataaggtgcacttgtgtttgctgcttccagagtaatctcaattgtactctcatctaccactttgataccggaaatttctgtagcgcttccgtttttgtagtcatcatatcctacaacgtttactttagatatatcctgatatccgtcataacttggatcagatacgactttgtaccagttcacgtaatcttctgcttttacatcagatccatcgttgtatttttcttttgtcagtttatatgtgtaaactttaccatcttcagaaacggacatgcttgctgtaccatcaacgatctcacctttttcatcattgacactcagagaagctgttgttgctgttacaacctggaaatcctcatttgcttcccagtataccggattgaatacacctgcaaagtctgcaacacctgcgatcagtgtgtcttttctctttgctgctgtctcaggaagtgcagaaggatcctctgcttcgatcagctggtttgttgcttctaatgatgtgtttgtgtcttgtgtctctgttttttcacttgtcttcttgtcgtcagatccaccgccgcaagctgcaagtgaaagtgccattaccgccgctaacaggcaggctaatgctttctttttcatattttttcctccttgaaaaatatttatgttgattcctgcattccccaatttatttactctattttttcttatagccgtattgctcatgtatgctgaaaatgcggaaacgaacattcgtcattgccggagcttattccatcattgctcccagtttttctgtcactgtgcgcacacagccgtcttcaaacggaatctgaagacctacttcttttaacatctctgtatagaaatcacttgcagacagtctgcacagcttcaaatagctctgccatgctgctttgtaatcttcatccatccagatcttgtactgcattgcacaagtctgtgccagtacataatctatataataaaacggatagtcataaatgtgaagctgtttctgccagaaaccacctttttccataaatggatctccctcgtaatcaaggtgtggtttgtattctttttccagttttttccatgccgcatgtctctcatccggcgtcagatccgggttgctgtagacaatgtgctggaattcgtccaccatgcatccgtacggaataaatgcgatcgcatcttccagatgcatctgtctgtatgtgtcagcttcttctttaaaaaacaaattcatccatggttctgtaaaaaattccatagacatagaatgaatctctgctgtctccatcgtgatatcccagtgctcttcgatcggatcacttccagaaacatatccctggaacgcatgaccgcactcatgtgtcacaacatccacatctccgcttgttccattgaaattggcaaaaataaacggtgcgcgatatttcggaagatatgtcatataaccgccggccttttttgtctttctgccgagcacatcaaagagttcattctccatcataaaatcaaagaactcttttgtctccggtgaaagctcctcatacatcttctgtccattcgccatgatctcttccggagttccctgtggttttggatttccgtccacgaaatacatgttctcatcaatataagaaagcttctcaagtcccagtctttctcttcttttgtcatgcatcttttctgcaagcggtacaaagtactctttgatctgtctgcggaagttctccacatcttctcttccataagaattacggttcatccggtaatatccaagctccacatagttctcatatccaagaagtcttgcctgcgctgtacgattcttcaccagcttgtcatagatctcatccagttcttctgctttgctctggaaaaacgcactgtatttttcatgtgcctttcttctgatctcgcgatcttcatgcgtcatatatggacggagtaaagacagatttaaagtttccccttcccagtcgatctttgcacttgcaatcagcttgtcatactgtgttgtcagcgcattttcctcctgcatcagcgggatcagtttctcatccatagctttaaattcaagctccatactcttgaatgctacttttccgatcttctcttccaatactcctctgtaaggagaatagtacaatgcttttctgtactctgtctcctgattgttgatcgtcggaagaacctcattgtaataattcttttcttcgctgtagaactcatctgcagtatctacatcactgcggatcatagcgatctgaatcatcgtattatactcatcacgcagcgcataaaacttctgatggatctcaaactgttcctctccactttttgctgccttcagctcctgtgtcagttcttttaaagctgctacaacagcctctgtatctactctctgataaggcatctctgcaaatttcataccatttcctccttgccacacctatctgtttgatcaattttatcattcctagtgctaatagatcaccgcactaaagtgttattattataaaccggtgtccagatttattcattatatactacttactcccttatttcaagatatttttgattttatttatgcaatttcacttttccattcttgcattctggagtctttttcacctggaaaagatgaaaaacttcaaaaaaactgcagttattttactgcagtttttcgttcttatagtttttacacggtttctcccattaacgctcttgccttttgaatgacagcttctccattcattcttccataatctctcatatcaatgacatccacaggtgtctcccctgccaactcacagatcatctctttttcaaatctaatctgaggccctaacaaaatacaatctgcatcagaaacaatactctctgccatcggaatcccaactgcttgaatttcacactcaaatccctgttttctggcagcctctttcattttttccaccatcatacttgttgaaagccctgcggcgcaaatcaaataaatatgtttcatttctctatcctcctatacatttctatcatttcttttgccaaatctataaaagtaatgctattcattaaatgatcctgtgcatgcacaagtaatatgctgaattctgctttttctccatttgcttcctgtacaagcaactgagtctgagcatgatgcgcttttagctgaactgcttttgcttccttcatctttaaatcagcatcctcaaatctcccttcttttgcagcccggattgcttcaaatgacaaggactttgcttcgccagaattcacaattatctctaataaattttgttcattctcattcattattttttattctcctgtctgataaattccctgtaccattcaccactttttttcacggttcgttccattgtatcaaaattcactcctactagaccataacgtttttgatatccgtttgtccaagaaagaagatccatcgcagaccagacatagtaccccgtaatatcaataccatcctcacaaagcttttcaattaccgccgtatgttcttttaaatatgcaatccgttcatgatcttcaaaccgtccattttcattcatctgatcatcaaatccaattccattttcggaaataataatttctatctttccatattcattataaattcgttctaaaagatttacaatgccttctggataaatttcccacccccattttgtataatttcctcccggaactttaacgtaagaaaacttatcttcaatcttattgctagtaagatttttcgctttcaccacacgtctcatataataattaacgccaagataatctcctgtattttcttccatcacatgaatctcatcctcttgaattactggtgcatgataggtttcctgacaaaacttcaacattgtttctggataatgtcctgttaatgctggacaaatataccaatccgataaaaaatcatatgcaatctcccttgctgtctggttttctacagtgtcttctaaaatatctaccggcattgggtttaacacaatcccaatctttccctccattttcatattccgaaataatcgaattgccttggcacttgctaaattataatggtgcgaaacctgaagggcatgtgcataatttttttcctgcggaggatgcgtcccttggatatacccttctattacttcggaggctggttcattgattgttgcccataattttacccgtccacgaaaatgttcaaacaaaattgcacaatattctaaaaatgcttggatgatttctggattcaaccaaccgcctttttccaataatggcaatggaagatcccagtgataaatcgtcagatatggttctattccatactgattcaatgtatccacaatccggtcataaaatgccaatcccttttcattgattcttccagttccttctggaagaattcttgaccaggaaacagaaaatcgataactctgtagcccaatttcatgaaataatcgtaaatcttcttccacatgatgataatgatctaccgcaaatttcccatcatatccaagattatttttctcataataatcatcccatgaattttttccttttccatcgcaataagtagcaccttctacctgatacgcagcagtggctgctccccacaaaatttttttatgcacttcttctttggtcattcattaagcacctactttctctgctgctttttcttcaagcactaactgtttttcataagatttaaagaatggataccaaataatcaaatctactgcaatcaatataataatccaaacaaaggcttttacatccattgttgacaatgcagcaccaagcggagctggagtggtccatggcacataagtaaatgtttttccaatgatatccatatacataatcaaataggttaataatccattaactgtttgtgctaaaataaatggaattgccaatgtcggatttaataccaatggagttccaaaaatcagaggttcattaatgttgaagatcgatggtacaatcgcaagtcttccaagtgtttttaactgttttgctctacttctcagcatcaggatattcaatgcaatcgttgctcctgcacctccaagtatcataaaaaatgctctaaacggctccgtataaataaattccggcactaatccctgtgttacaagttctgcatttgccgtcaaatttcccagttcaaatgctcctaccactccactgacaatagaagaaccatgaaggccaacaatccagagaatctgtgtcactaccgagatcagaataattccaaacggcgaatccacagcgactaccaatggctgcaatgctgtttttatcaattccggtatcaataatccggcacttaatttttgtaccagaagactcagcaaaaatacaccaactgcattaacaatcaatgggataattgatgcaaatgaagcctttacagcagctggtactgcatctggcattttgatcataatgttcttttcttttaaaaatctggtcacttccgttgttacaattgctgctcccaaaaagcttgttggcattagtacactttgattagccagcacttcttctcctgtcatattgggagtaatttgagaagccataaccccaagatttgatggtgctgaagcaatcagaaagcaaactgcggaaataatcatggaacccataggatccattttataagatttcgccagagaatgtgcaattgccatacagataaacaatgccatcattcccatagatgctctctgcagcaattcaatctgcattccatattccaccgcccattctttccacgcaattaaaaatttaaaaagaaagttggtaggttgcattgtattcaaattaaccggcggtgaggttacgattagcgtcattcctcctagaagagctaatggcgtcgcagctaccatgccatcacgaattgctttcaaatgcctttgcttggaaactttattacctatcggaattaatttagaatctaaaaattgttcaaatttatttactttcgttgcattcatctgaatttccccctttatcttttcttacgttatgattttaactacattcatgccaaatcgttctgataacctgattactttttctagattatccacggaaatttctaattgctcctgatcatatgaaaaatgacagtctttttgaactcctaaaacctctattttctgaatcttcctttcttggcctaatagaaatggaatttttttgaaatccgttgactgtagaaataaatataacgcctcatctttagcagtcactggaacctggctttcctcctcatatggagtcgtatcataaattgcttctccacaaatttcaagccatgctcctatttccatcaatcgttccacttcatgaattggaatggtcccatctgccatcggtccaatatttaacagaaaattacctcctttggaaacaatcgataccaattctgaaatcagttcttttgacgtactatagtcttctagacgttccgcacgattaaatccataggattttcctattcccctgctttcttcccacggatgtccgccaatcactttatcacgatattctgtcgaataataatccccatgatttcctggcatttctttataaaatctatcatttactaccactttgtctttcacaggggattcttgatataaccaactcaaaaaacttcgcacagaactctcttcttctgtcagatcccattctcctccatctgaaaaaatcaaacttggttcatatgtttctactaattcatataattgcggctttaaaatttctttcagatacgtttcttttgtaactccatatttttccacgtccttttgcggaataaagtatcccccattacatcgatgagatggaacactttcccaatcgataatagaataatacaccccaaactcgattcctttctgtatcaccgccgttcttaattttcccaccagatctttcttgggtccaatttcccctgaattccatcctttcttatatggatttttggtaggccacatacaatagccatcatgatgctttgttgtaagaaccatatattttgcaccacttttctgaattaagtccgctaaatattctggatcaaacagttctgcatgaaattgttttccaaactctctgtaatcagaatccccgtacatccttttatgaaactcttgatcctgattccgataagttccatatacggaagcgtaataccactctgcataggaaccaaactgttcattatttacagaacgatacgccggaacactatacggcccccaatgaataaaaatcccgaattttgccctctgaaaccattctggaatttttctttgatccaacttttcccacgactctttcattcacgattccctccttctattgattttttataaattcatattaacacatccctctattatctccagacagaaaaactccacattcattccggaaaaaatgaatgtggagttcctctcttttctatatatagtttaaaaatgcatcatatgtcttattttttataatcgactgaattactttttcattcataaaaatctgcatggtttcctgataaaacttttgtaaatttttatcttcctgactgccaatcaaaaatagaaatacagcttgtacctgattccgcccccagtctatctccttgtctaaaattcctacaataaccgtggtctcttccaccactgtctgatatggatgtgggattgccaccatatttccgtaatcggtcgaagataattcttccctataaagaacagactcttctaccccttctggcaaaacgaatacctttcgtgctttcctgcataattcataaatcacctgttctttagactctgcatgaatatctgaaaagaataattctcttttaaaataattttttaaaaaacaatgattcccttttttcagaattttcctcacagtcacaatatcctcattattcagaaatagtccaacttcataaacaggcactggaattgattctgcaattggaactgtcgtaaatacataatcaatcgcatcaaaatttctatactttaattcaatcagattacagacttcaatttgatcaatataatttccaaattcctgtctatatttatgtaccagcaatctggagcttccttttcctgagttgcacacaatcaaaatattattcttctttatttctgtctcctgctcttctaatgctaatgcataaataacagccagatatccaatctcatcttccggaatcacttttccataatattcctgtaaaatcacagctgctctttctgcgatcgtataggcaaatgaataattcttttgtatatcttttaataatggatttacaagaggaatattatagcgcagcctgatatccaaaggaaccatatgctgcttcaagagcataattaattcaaaattatttttcagatttaaattaaattcctcaaaagaacttacaaccatctgctctaccagttcattgagatcttctttcactaccagattggtttcccctgtatttcctactatccgcttcccagccaggtgaattgccaaatacattctttcttgctctggtattatcatcccataatatgtctctaattcttttcccagtttttctacaatttcaaaatgtgagaattctatctgcacctgttcttctctgcaaaatgtaatttcacaacctttttgtattcttctcactgagacataaatatattttatgaaattataaaatgcaatctcaggaattctaatatgatacctgtccaacaattcccatacaatctgccccaattgttctagttcatattctacattgtcacacttctgtttcataaacaaatctaccagacaatctctaattgcagattcttctccaacagcagaaattccatagccaggtcttcgtaaaatccgaatcccatattgctgtaatatcctttctgtatttttcaatgcagttttcaccacactatctgtaacaaacaaccgatctgccaaatctgaaatcgttacatattccttttgctccaacaaaaactttaaaagccagtttacacgctctccaggagtagctgggatatcttccccaatagaattttcttgaaacaactgatccagaatgtgctttttatttccactttttatattcaatttgaatccaaaatgcggctttgcctgaatttccatcggattgccagggattgtttctagtatctcattgatttttctgatctttccccgtatagttctgctgctatatcccgttttttcagcaagttcagaagaagtaacatacttatctgttgaaagaatttccaaaatcaatttttcctctctatccgctttcatacggctcaccccaattcaccaattcatctctctgccacatactattcacgttgattcaatatcgaaatcctctgataattttttctaaaatacacaatcaagattcccattaccactaccagcactcctgccagaagctgcgaaaccggaagtccaaccactgggaggatcagctgatctgtgcgaagtccctcaatccatacacgtccaagtccatatccgaacatataaagaagaaacaattccccttcatactttttatgctttcgatacacaaacagtatgatcagaagtgcacagcaccagagggattcatataaaaatgtcggatgaacctgaatgtattctacaccaccaatactctggatatgcatgcgcatctgctctgtcacatccgaacttctgactgcgtcgatgggaagacgcattgcaaacagactgtccgtatattccccaaatgcctctctgttaaagaaatttccccaacgtcccagcatctgtccatttaacagtgcaagcgcaatcgtgtcaaaaatctgaggtgcactcaaatgcttcacttttgctgcaatgatcaccgtcagtaccgcggcaatcacacctccataaattgccagtccgccttcccggatattcagaatctccagaaggttatccttatacatgtcccaggaaaaaatcacataatacaacctggctcctatgatgccgaagaccacaccgatcatccccatatccagataattctccggatcctgcccggtacgctttgcctctgctgtagcaatcacaaagccaaggagaattgcggttcctatgatgattccataatatgcaatttcaaatccaaagatggaaatcgtctttccgacatgttccagatggattccaagattgggaaaactaatatcatagtgcatgcttcctgcctccaattttatacattaaaccggaatacaataatatctccgtcctgaacgacatactcttttccttccagtctgaccagacccttttcttttgctgccgcatgggttccacatgccatcagatcatcatagctgaccacctctgcacggataaatccacgttcaaaatctgtatggatctttccggctgcctgcggtgcttttgtgccttttgtgatcgtccatgcacggcactcctgctctcctgctgtcaggtagctgatcagtccaagcagatgataacttgctttgatcagtttttccagcccggactcttccagcccaagatcatccaggaataatttcttttcatcttcatccagctctgcaatctcctgttcaatctgtgcgcagacaacaaatacttcacagttttcttctgccgcatactcacgaactttctgaacccctgcattgtctgcaccgtcattcgcgagatcatcctctgttacattggctgcaaagatcaccggtttgtaagtcagcaggttatagcttgtcagccattcctgttcttcctcatcatctgttgtaaaactcttggccatcttgttttcttccagatgttctttgattctttttaacagctccagctcttttgccgctgtcttgtcatttctggaaagcttcacaacttttgcaatccttctctccagaatttccagatcggaaaagatcagttccagattgatcgtctcaatgtcacgcaatggatcaatgcttccatccacatggacaatgttgctgtcttcgaagcatcttacgacatgcacgatcgcatcgacctcccggatattggcaagaaactggtttccaagcccttctcctttggatgctccttttacaagccctgcgatatctacgaattcaattgctgccggtgtgatcttctttgtgttgtacatctcacccaacacgtccaatctgtgatccggcacggtcacaacccctacattcggatcaatggtacagaacggataatttgcagattctgcgcctgcctttgtcaatgaattgaataatgtactctttcctacgtttggtaaccctacaattcctaatttcattttatctattgcctcctctgatgtgttcatttctaacacaatgattttaagtataccatatgaaaaatattttgtgaatatatgggctttaatcccgtgtctccatcagcactacaattcctttcggaaaagagatgcgtacctcttcctgttcaaatgcattgctgacacagagactgtcatacgccgttaacttatggttgtgcagcggatatttcgcgccttcaatattgaatttttccacacactctcccagtgggaagaccgaaaaatacggcccataagcctctgctttcaacagtgtgactgctttgttgataatccggatctgattgtgactgtctgcgatcctgacatccgctccggcgtccagcccgatctttaaacattgtatattcgcccatatatgatcaaccctgctgccggtcgcaccgaggatcaggatgttctttcttcccagatccagacacagccgcagtgcgatttctgtgtcagaagcatcttttaccggattgaactttcgaatgggaactttcgtttctttctcataatactgcaggatctcattcgacacactgtcaaaatctcccacaatataattcggctgaatgttgtgatggtataaatattccaaccccttatccacgccgatcacaaactcaatctcctgattttccagcacagatgtaacaaattcttcttctaacatcccaccgcttacaattacagtccatctattcattgacgcttaaaatctccataaatccttttacgttgtctgccacatttcctttaaatacagcagaaccggccacgatcacatttgcccctgcatccagcacttcttttacattgctgtgataaatgcctccatcgacttcaatgtctgcctgaatttttcttgtatccagcaatgtttttaattcccggatcttatccagagattccggaataaatgcctgtccgccaaaccccggttctaccgacatgatcaaaaacatttccgtctgatccaatatcggttccaaagcagatactggtgtattcggtttgatcgatacccctgccttcattccacatgcatggatcttttccactgtttccaccaggttttcacaggcctctgcgtgaacagtcaggatatccgctcctgcctttgcaaaatcttccacatagcgaataggttctgtcaccatcagatgaacatccatgacctgatctgtatgtcctttgatcgatgcaagcaccggcattccaaatgaaatgcttggcacaaacataccatccatgacatcaaaatggatgtactccgctcctgctgcttctgtctcctttaactgctcgccaagccttttaaaatccgccgacaaaatagacggtgcaattatatttctcataaatcaatacctcttcttttctttcaactctgtatacatctccagataatttttatatctgaccggatggatttttcctgcttccagtgcctcttttactgcacagcccggctcatgtacgtgatcacatccctggaacctgcacattccttcatagtctgcaaattcccgaaaataatatttcaattcttctttttcaaaatcattcacataaagagaactaaatcccggtgtatccataatataagaatcctcatcgatcgggatcagctcggaatgtctggtggtgtgtttcccacgctcaatctttctgctgatgctgcctgtttccatctgcacctcactctggagcagattgatcagggaggattttcccacaccggaaggtcctgcgattgcagttgtcctgttcttcagcatttttctgatctcatctatattttcctgctccagagcactggtaaatacgatcggatatccacaatgttcatagattgcttccagttctgcgatctcaggatctgctgcgatgtcctttttattaaaacacagaactaccggaatttcttttcgttccatcattaccagaaaccgatccagaaggttgaaatgaggcgccggctttgtcactgcaaatacgaccagtgcctgatcgatattcgctaccgccgggcggatcagctcattttttctgggacagatttctacaatattgcctgttttattctcattatctaatatttctatccggacgttgtcacctaccagaggctttatcttttctttgcgaaatacgccctttgccttacactcataaacaccggattctactacatttacgtagtagaatccggcaatccctttcactatttttccctgcataatttcctctgctaagaatggttccatcctgtggaggagccaccatttgatccaccgtcacttccattcccgccagttccatctgtcggaggatacgtttctgtattttctggtcccagactgactacgacatcaaccgtctttcctttctcaatctggcttccaggtgtcacggactgactgattacataacccttcgtcacagtagaatcatatacttctgtcacattcgctgccaatcctatacttgacagtttgctttccgcctgacttcttgtcaaaccagagagacttggtacttctacagtttctgtcttcttccctttgctcagaacataattcactgtggtccctttttctacctgctcacctgccgccggctctgtacggataattgtgccttctgcatattcatcgctgtactcactggagctttcactgcccagtgtcagttcagattgctgcaatgttgccgatgcactctgtggatctgctcccgccacgtccggaacactgatctttttcttgcccatgctgacaatcattgtaaccgtgtctccttctttccactccgttccattggtcgggttggtagaaatgacgtgaccctgtgctacactgtcactataatcggtttctgatgacaccagaaatcccttatcctccaggatcttctgcgcatccgcctcggattttcctgttacatccggtactttgaccatcttttctgctggtccgctgctgatcttcagctctacggttgaatttttcttgactttatcgcctgctttcggactctgatcggccacttcccctttctcatatttatcggaagccacctggcccacaatcttatatccgatttttttcttttgaagttcctcttttgcctctttttccgtcatgcctctgacatccggaactgtaacttttgtttcttccttttctgtcacaattttattcggcataagtccgccaatcgccttgctgattccaaagatcactccaattgcaacaactgctgccacaacgatcatcaggatctttgtaactttcttcatctgcggatcgacttcttcctttttccccttccgctgactgtcacggcgatctcttggttcatattcatcctcttcgtagtcatcataatcatcatctggatcatcatactcataatcccggttctgaactctggagatttcctgagtgtccattaccacggtctcatccgaattgttcgtttttattccattcgcaagaaaaccgccctgtggatcgaccagtgcacgctttaaatccagcaaaagctcttcacagttctgataacgctgcatcgtacttttctgtgtacactttaaaataatcttttccaggctctttggaatatccggtacttccaccgccggagaaacaatctcctcctgcagatgcttgattgccacagacactgtagaatctccgtcaaacggaacatggcctgtcaccatctcgtacatactgatccctgcagaatagatgtcactcttttcatctaccaccccgcctcttgcctgttccggagatgtgtaatgaaccgagcccatcacactggtactgatcgtattcgaggatgtcgttgctcttgcaattccaaagtctgttacttttacttttccatcttttgaaataatgatattctgcggtttgatatcccgatgtatgatatgctggttatgggctgcctgaattcccgtaaccatctgaatggaaatgctgattgtttcttttgcagaaagttttccttttttctgaatataatcctttaatgtgatgccctctacaagttccatcaccatataatagacccctcggtcctgtcctacatcatatacattgactacgttcggatgcatcagtccggctgccgcctgtgcctcacttaaaaacttctgaataaatgtctcatccgaacgaaaatcactttttaacaccttaattgcgacatagcggttcagcttatggtcttttcccttatatacatccgccattccgccggatccaatgcgatccagaatctcatagcgttttcctaaaaagatgccttcttttaacatatactcacctcatctgcgaacggttctaccagcacgatccctatattatccgtaccaccgttctcttttgccgtttctaccagagactgtgcggattccacaatatctctgcccccctgtacaatatggaacagttcttcatcttctaccatattggtgagtccgtctgtacacatcaaaatgatgtccccttttttcagacggtgctcgtaaaaatcaacttctacactatcctttgccccaatcgctctcgtaatgatatttttatccggatgatgctttgcttcttccggcttgattcctccgagacgtaccatttcctctaccagagaatggtcttttgtaagctgtacgattccttgattgatcaaatacagccgactgtctcccacattggcaaaatacatcatctgattcacaatcgttgccagtactaccgtagtccccatcccctttaaatgaggatcttccgaagcctttttgataatctccctgttcgctgttttaattgcggaaacaagcgctctttctacatcctgctccctggtattctccagttcacgcttcaaaacctctaccgtatacttcgaggcataatcacctgcctgatgaccgcccattccatctgccacgacaaacagattcggaagaggtcccaacggattgtctgtcatatagacataatcttgattcacttgtcttaccataccaacatctgtaatggaaaatgtcttcatacgctctctcctttactcatgctctgtttttacatagcgtcttctaagctgtccgcaggctccatcgatatctgcgcccatttctcttcttatagtaacatttattccgcttttttcaagtttatttttgaaattcagcgcatttttacgggacggctgctgaaaatcccgttctttgatcggattgaccgggatcagattcaaatggcagtttctggactttaaaatcccgatcaattcttctgcatcttcatctgtatcattgactccgtgaacaaggctgtattcgaacgtcactcttcgtcccgtctcccggaaataaaaatcacatgcctccagcacttcctccagcccgtatttgtttgctaccggcatcagctgctttctcttttcctgggtcgatccatgaagcgaaagcgccagtgtgatttgcagatgctccattgcaagctcacggatcttcggaacaatcccgcaggtggaaaccgtaagatttcgctgactgatatgcagtccatgttcgtcggtgagcatctttacaaaagtgagaaaattctcataattgtccatcggctctccggttcccatcacaaccacattggaaacccgttcttctgtcatcttctggatctgataaatctgtcccagcatttccgagggagaaagatttcgctccagccctccaatcgtagaggcacagaacctgcagcccatccggcatcctacctgagaagaaatgcagacggaatttccatgtttatagcgcatcagcacactttctactacatttccgtctgaaagctgaaacaaaaatttgtttgttccatcgattttggaaatctgacgttccaacatttttaccggaagaatgacatattcctgctccagtttttcccgaagcgcttttgacagattcgtcatttcttcaaaactgtccgcaagctttacgtgcagccattcataaatctgtctggcccgaaactttttctcaccaatgctttctatttccgctgtcaattgttcatatgtatatgcgcgaatatcttttttcatctttttctacccttttattttttcttcaaccttgcaataaaaaacccatcgcttttatggattcccggaagcagctggagacatcccgtctcctccacacaatcctgaagttccccacacaatctgtccctgataggatccagtgaaaactcaggaaatgtctttaaaaaccaatgtacattttccatattttcttccggattgatcgtacaggtactatagaccaatgtaccccccggacgaacataggatgccgcattgttcaaaatcacccgctgcagttttgccaactcttttgttccctgctctgttgctttatattttaaatcggtcttctttcccaatacacccagtccggagcatggcaggtctgcaatcacaagatctgcactctcttttgacgcttcatcacagatggttgcgtctttttgcacagcagaaatattagaaagtccgcttcgttcgatattttccgtgatcagtcccactttatatgcacttaaatctcttgcttccacgcttcctgttccatgcagtttttcggcgatatgaagtgcttttcccccgggagctgcacaaacatcgatcaccccatccccttctttcgggtctgcgatttccccaaccagcatcgaactgacgtcttgaacataaaattccccgttctgaaaaccggtcagctgcgaaagatggtcatacccctgaatccaaaaggcataggaaagatatggatgcggggtaacaacaaccccttctttttgcagacattccatcaaatcgtccggagttgttttgtccagattgcatcggatcgtcaccgggatttctttttgaaatgcctgcagcatggattccatgactgacagatcataatgcttctgccatagctttaaaatccactcaggcatagaatatacaattgacaaacgctccatttcatcttttggatattccacctgatccaggcctcttgccacattgcgaagcacaccatttacaaatccccgcagtgttccgaatcctttttttgccgccagtttgactgcctcattgcagactgcagaatccggaacattgtccatatacttcagttgatacacagcgctcctgaggatattgcgtatcacaggcttcattttattgacctttactttagaaaactgattcaaaatataatccagctcgatcatgtgctccagcgtaccctctgtcacccttgtgatgaatgcccgctcttttttctccagatactgatatttttccagaacactgttcaacgccagatggctataaacattctgctgcgtcacttccatcaggattgccaataccagttctctttccgtcacctgcttagtcatctcttcttcctccacttatgatcaacagacgtaataactgcagaatcatagatgctgcactcgctacatatgtcatggctgccgcccgcaggacagctttggtctggctcaactcttccggatacagcatccccgatgtctccaggatacggatcgcacggctggaagcattgaattccaccggcaatgtcacgatctgaaacagtactgcagcagaaaacaacaggattccgagattgatcataaaagcggctgtatttccattcataaacagcccgatcacgatcagcggccacgccgccatggatccaaaattcgcaaccggaaccatcgctccccgaatctgaagcggtacataccccttcgcatgctggatcgcatgcccgcattcgtgcgcagccacaccgattgctgcaacagaagccgaattgtacgtggcatccgaaagcccaagtgtctttttcacagggttataatgatcggtcagattgcccggaatatgatgtaccgtcacatcatagatcccgtttgcgcgcaagattcgctctgccgcctctttccctgtcatacccgaacgactcctcacctgtgcatatcttcgataggtactgttgacatgcgccgaagctgccatacagatcagcgctccaatgataactaacatatacgtaggatcatagtaaaaatacatgctcttcctcccgtcattttatttatgcatgaaataaagttccttcttccagatgatatcctctcaaaaatgcatccgcctgcattcttttcttacccggaatctgcagttctttgaccacaagagttccttctcctgtctgtacaaagaagctttcttttgtcacctctgtaacagttcccggctctgcctgtgtctgcatttctgaaacttcggctctccagatcttcactactttttctccccaatatgtgtacgcactgggccaggaattcagtccccgaatcagctgttcaattgcttttgctgacatattccagtcgatatttcccatttttttattcagcatacttgcatatctggtcggtgtctctccctgcttttccggaacgatattcccttcttccagcccctttagtgtctccacacaaagtgctgccccggcttctgaaagtttgtcgtggagactctctcctgtttcctctgccgtgatccgcactacggtcttcagcagcatatctcccgtgtcaagtccttcatccatctgcatcgtcgttacacctgtcacatcttctccgtcaatgatcgaccactggatcggtgctgctcctctgtatttcggaagaagcgatgcgtgcacattgacacatccatatggggtcagttccaggatttcttttggaagaatctggccaaatgcaatgaccacgatcacatccgccttgtattctgccagtttttccacacaggcagcctctcttactttcacaggctgaaagacctcgatcccgtgagaaagcgccgcttcttttaccggcggaaactgcatctccttgccccttccctttggtttatccggttgtgttactgccagacatacatcatgtcctgcatcaatcagtgcattcagagtccccactgagaaatcaggtgttcccataaaaatcacacgcatttattcttcctcctcttccggcgcttctacatcatgcagtccgtcctccactttttctacatacatatgtcccgccagatgatcgatctcatggcaaaacgctcttgccagaagtccttctccttccagttctacttcttccatattttcattgagtgcgcggactttcacgtgatttggtcttgttacgattccccattttcccggcagactcaaacatccttcttctcccgtctgctctccggatgtctctatgatctgcggattgatcagcacgatgggaccttctcccacatcgatcacaacgatctgttttaaaattcctacctgcggagctgccagtccaacgccgtatttttcatacattgtatccagcatatcctcgatcagaatttttgtgcgcatggtcatctttgtaaccggcttgcactgctttgccaaaatgtcatctcccataactcgaatttctctgattgccataatttcacgattcccttcttttattattctttgtcatctattaaaaaacatgcatcggattgaaatcaaactgaatccgcatcttgcgataacctggatttacttctatatactgttccaatccgtcctttactctcacaagtgtatcataattttgatcttttatgtaaattacttttcgatatacatcgttgatttttccaattcctggactcgcaggaccaatcacattggttgtctctttggatgtgatccgaatcgaaaactctttcagatacctgcatcccgtctccaaaagtgtctcgttctcacaacttaccaggactgccagcagattctccaccggtggatatcccatcatctggcgatactgtatttcttcttcataaaatgcctcataatcctgagcggctgctgtcacaatactgtaatgctgtggactgtaagtctggatcacagcctctccctttttctgccctcgtcctgcacgccctacagcctgtgtcaaaagctgaaacgtccgttctccggaacgatagtcatccgaatacaatgacatatccgcagccagaacgccaactaacgtgacattgggaaaatcatgtccttttacgatcatctgagtaccaaccagtatatctgcctctccattggcaaatgcagacaatattttttcatgcccgtctttctgttttgttgtatccatatccatccgcaaaactcttgcctgtgggaattgtgcctttacaatctcttcaatctgctgtgttcccgcccggaattctccgatatgcctggaaccacattccggacagaccgatgccctcggctcttcatatccgcaatagtgacagatcatcctgccattttggtgataagacaaagacacatcacaatggggacactttaccacatgcccacactctctgcaggaaagaaaccctgcatatccccttcgattcagaaacaacatgatctgctcttcttttctcagtctttcctccatcagttcctgcagatgcctgcttaaaatggaacgatttccttctttcaattcctgacgcaaatctgctacataaacactggccatttcctgcattccggaacggttttttagttccagaagacggtacttcccgtgtttggcacgatacattgcttccagagaaggggttgcagaacccagcaccacactggcatgctccaggtctgcccgctctatcgctgtttctctggcatgataccttggaatctgctcacttttatacgtggtttcatgctcctcatcaataacgatcagccccagatccggaaatggagtaaagagcgctgatcgggggccgatcatgacatcgatctccccgccttttgcccgcatcagctgatcataacgttctcccgcagacattctggaatttaaaatcgacacccggtctccaaagcaccgataaaaccgcatcaccgtctgatacgtcagcgcaatttcaggaatcagaacaatcgcctgttttccttccccgactacacggcggatcatctcaatatacacttctgtctttccgcttccggtcaccccatacaacaggtaagatgcccgtatgtcctgtctgtactcttgccagaaatactcaatggcacgctcctgctctgccgtaaatgcaatatctcctgacttttgtgcaattttctttactggattacgaaatacctgctccgattccaaaacggccacattctgttcttccaacgcttttaccacactacgtgtaatgttcagcttcttcgtaatcagttcatactcaatgaccggatcctccagaagtgcttccagaagcctggctcttgccttttgatttttcttctgataataatgcagctgctgtaccgcccgttctttcggaagcagcagtcgtacatactttttcatccgggcattttccttctgcttgatcggcagaactgttttaagcgcctgaatcatggtcccaccataatattctttcatccaggcagccagtttgatcagctttgcttcgatttccacactgttcgtggaaatctcttcaatctccttgactttggaaagatcgtaatcacatttttccgaaattttgattacataccctttcgtcttccggttccccctgccaaacggaatgacaacttccatcccttcccgcagatgttcttccagattctccggaatccgatactgaaagatcttatccagtttttcatgctttatatctacaataatatctgcaaacaatccatttcccctgcttacttcttctctttttctgcaagctctgtcagaatctctgaaatcagaactctctcatccatcgggtgcttcactccctcgatctcctgataatcttcgtgtccttttcccgcaagcacgatcacgtctcccggctgtccatgcgtgatcgcataccggatcgcctcttttcgatctatgatctccacataggctccggctgtctttttcattcctactttgatatcgtcgatgatggcctgtggttcttcaaatcttggattatctgaagtaatgatcgtcagatctgccagacgacctgacacttctcccatctcaaaccggcgatctttggaacgattccccccacatccaaacaaacatacaagtcgctttggatgatattcttttaatgttgtcaaaagactttccagactcatggcattgtgtgcatagtcaatcatcagcgtaaagtcatcggatacctttaccatctcaattcttcctttgacttttgcctgcttcagtgctgcctgaatatgctcctgcggcacagaaaaatgtctgcacactgcaatcgccgtcagcgaattgtacacactgaatgttcccggcacatcgatctccacatcaaagtccattgttcctgccacatgatatgacacaccaagatatccgggacgtgacaccaggctgacattctctgcacgaagatctgcctctttccggaatccgaatgtctctacctgacaggttgcattctgaaatacatccctgaaatattcgtcgtctgcattggctattccaagcttgcactgctgaaataacagacctttgcatcgcttataatcttcaaagtctttatgctcgtttggaccgatatgatctcttcccagatttgtaaaaattccgatttcaaacggaatccctgctgtccgatgcagcatcagcccttgcgaagacacttccatcacaacgctgtcgcatcctgcctctaccatcttcgcaaaatactgatggatggtatacgactccggagtcgtattggctgccgggatcacttcgtctccaatgattgcctcaatggttccgatcaaccctactttgtgccccactccctccagaatggatttgatcatataagttgtcgtagtctttcctttcgttcctgtaattccaatgatatgcagcttttctgcgggatatccgaaataagccgccgatgccagcgccaatgcatacctggtatcttctacacggatcacggtcatgccttccggtgctgttacctctttctgtacgatcacggctctcgcccctttgtttgctacatctgttacatattgatgaccatctgaaacagctccgctgatacagacaaacaccgatccttcttctactttccgtgaatcattgatcaatgtcgtgatctcaatttcatcacttccctgtactatttcatattccaaacgctctaataactgttttaaaatcatacctgctcctcctgatcaaagggatttgttcccaacatatattgtataggataccataaaacaatccatgttgcaaaaactgatacacaaaaaaccggatgaatcagaaaattccgattcacccggtttcttaaaaagaacttggttctattctgttgtaagatagaatgttacagcagttgtatctccatactgaagaactctgtatccagtctctccttctgccagtttatagttggatggcagatattttaccatggacaggtcgaatgtgaaatctcctgtctctgttcctgtatgcgtccactgtccggtacgaacccgatgatccacaaataccgtatagttcacggttgttgtacgttcctctacttccggtacctccggttcgaggactttcacatacacgtcaaagctgctgctgtttcctgctgcatcgtatgcatagaagcgtactttatactctcccggtgtcttcgatgtgaatggctgatatccatccagtccatgttccagaccccatttatctactttaaatgctgctgtgccggaattgtcttttacccactccggttttgtgaacatctctgtcagctgttcttctgtgtactcttctccctcattcaacgggatctctctcttatatccctttgctgcttcaatggctgcataatcaatcaccggtgcttctttgtcaatgtttgtaatgctaaatacatacgcatctcctgtcacacctgttgcacttgtcagggtaacgctgtattctccacttgccgtaaatacttttgtgaaggttctcttatcgactttcttccatccttccggtgttgcacagtctacagaggtcttgatcgtcacagttacatctttcttggtccagtctgtgatatcctgtgtcagttctaccactgccggttttgtattgtcgatgcgttttacttcgacaaactgcggttctgatacattgcctgcaaggtctgtcactgtaaatgctttgtctttccagtttgctgtaaatgtcttcacatagacataagttccgttttcctggcctttcagagaccatccttcacccggaagctggatctcttcacttgtctcaaggcgtacttctttagactgttccagtttactgttgtccacgatccactggaatgtcggagcctgtttgtcaatgcctgctaccgtgtaagtcacttctttctgctgattgtcattggaaactactgtaacactgtatgttccattctggctgtaagcttttgtcagcacggtatcggatacgcgagtccatccttcgatatcctgaatagaactattcgctgtaagtgtcactgttacatcctgatttgtcgggattacttctcctgtttcctctacattcgaacaagctgcctttacattcagctctacagtaaacactgcatataccgtcatatcttcttctatgattgtatttgacgttacttcctctccacttccgtcttgtgctgtataccagcctttaaagaagaaaccgtctttctttggttcttccggaagtctgtccccgattgcctcaccaaccggaacttttacaaccgtctgtgttccgtccacatcaaatgtcacggatgcttctttcactttctgtccaatggaaattccatgccatgttccgttttctttatcacctgcataagatttcagataagcttcttctcttccttccggaactgtaatataagaatcttgcggacaatttacaaatggaacatatccacttgctaccggcggctcgatcgcatctataataaagtgaatcggtgcattgtcttcagaagccttttcatatccaaatgtatgataattaaatctcttgatcgtagccggaatatgaatctctgtcagtccggaatcccggaatgtcagagcaccgatttcttctacaaccggcatattgacagtttcaagagctgtgctgctaaatgcagaatctttgatctttttcacactcggaagatccacattctttaatcctgtacataactggaatgcggatgccgcaatctcttctacattcggaatccgaatcgatgtcatatggttctgtccgataaatgcacctggtccaagtgctgtgaatccatccagttctacggaaaccagttttactgttcctctaaatgcataagccggaaacgttgtagaaggcactcctttaacagtttcatatgtcagctggtcattcaggttcagtttcaaagtcttcagtccaaacagattttcgtttgcatatacgatatcctgctctctggctgttcctgatacaaattccaggtaatcaacctcaaagcttggattccatccactctgttttacaatgtcttccagacttgctccggacatttcccgcgcatctgcgccagatgcatcggttccgatttttactgtcacattggcgatcggttcctctgtctttaacggcagattgcaccatgtacgtttttgctcatttccctgctcagacttcaggtaggtatcttcactgccttccggtacttccagtgtagacgttggagccgcatctttaaacggagatggttcgttattaccactctgtaccttcggcggggttgttccttccatcactacatggaattctacttccggtcccggttgtcccatggaatcacctgtgccaaatacagcatagtgtaaattttttagactctttggcaatgtaatgttgcgatatccagagcccaaaaatgcagcttcacgaatggtctgcacatttggcatatgtactgttgtcaggtttggagtctttgcaaatgcccaggtagaaatatatgttgcatttggaagattggcctccgtcagagcagctgctcctgaaaatgcagaagatccaactttctgtacatcattcatttggacagaagtcagatttacagctctgctgaatgcattgcttgcaatctccgtaaatccgcccagttccgctgatgtcaggctgtctttttcagaaaaagtccatgccggaaatacggtagattctttgccgtctttcttcacatatgtcaggccatctttcagattacatttaaattcctgaatctggttcacattgcttttgatataccccatatcgctctctgttacggtaccggacacaaattccagggaagtcacctgatccgctgtcacacctgcttttgcaactgcatcttccagacttgcgcctcctgtctcctgtccattcaccttcactgtcacaactgcagctggagtcgtacttgtacaggtgatcacaagctgtccatctgtattgaatggatacacacctttggagtttttctctgtactgtaggtaatatcatatccgtcaattgcttccagctcttcgatactgtagatcggctgatatggaaatgcttcttttccagactcatactctaccatatctttccaggtgtaagtataattgttcgcagcatccaatgtgattgcctctgctccttctaccgggaacacaaaactgccgtcccatttctgatacatcagctgcagcttgattgccggacggtttgccgcatctgcgccaacccagtcaacacgaatggttttatcctgttttcttgtattcaatgtataggtggcacgaaattcccgatcacctgttttttccgtttgaatctgataatttgtgctgtatcttcccgggtttaacttccattgtgcaagctctccccgcttgttataccgcggaacctttttaaaggtatactgatatccctgactgatcggccccggagaaacggtggcgttcccgtactgtgtttccgctctataatatggactgctctcatcgaccagcgtcggtgcaactttatcgggtcttacccctgccaaattgtcctgatcttcccaataatatgtcacatgatacacatcggttgctgtaagatccggtactgccttatatacatcaatctctcctgccgatgccagtacccccgtctcatttgtattataagagcttgaaattgtgattctcacatccgttgcttgcaccggttcgaaatcaatgttgctggtaccgccctgccccacatcctgcagtgtttcctgctttacgacagcccagtctgtatctccgtttttcacctcgactttgatgtctttgaatctgccgttggcaccgttgccttttacgcgatatccgatccggccaatttcataggccccgcccagtgaccactgaatccagtgaggacctgtcttcgaatcatattgactgtgccatcctttgttgacatctccatcaaatgcaagtgctgcgtttccgtctccccattgaggcgaatcttgaaacgaacttgctgttgcactgcttttcataggttctttcggcaatgcttcatactgtactgcttctttgctctgcgcgcttttactctcttgggcctgaacatcagaaaaacccgtcagcggctgcagaacaccggcgaacatcgcaattgccataatccaggcaagcagtactctttttctctcttttttcatacctttctttcctcctgttttcttgcttattccaaactcctttcctcttttttaactttttttacaaagtcatattccctaagcatattatccattttagtatactactgcctctgtattttttccatattttatgtatatttctcccatttttttctatttttgcacaaaaaaagaaagcatcatctgatatgatacttccttttattataacatctgccttttattatggggtttctgccatgtgtacagtcagctgattaaatggaatctcaatgccttcctcatcaaatgtcagcttgatttcttccaaaagccgccaccttgtcgtccaatactcttctgttttcacccatgcacgcagtcccagtacaaccgaactatccgccagagaatcgacaaacactttgatatcctcgtcctgtatgatcgaatcgtcttgctttaacagcgtttcgatcaaatgttttgcttttttcagatctgcatcgtatgcgattcctaccttcagatccagctgccgttccggtcttgcagtcacattcgtcaggctgctgttagaaagtgttccgtttggaatcacaatggtcttattgtctaccgtagtcagcttggtataaaaaatctggattacttttaccgttccctcggttccatcattggaaacaataatataatcccccactacaaagggtttcaacagtaaaatcaaaacaccgcctgcaaaattggaaagacttccctgcagcgcaagaccgattgccacacctccggaggcgatcagtgctgcaactgacgaggtctcaattccaaaattcgttgcaatcataaacagcagcaatgcataaagcccaaatttcagaaaagattctacaaactgtgtcactccggtatctgcattcgcccgctgcatggagcgtttcaccatcttctggattccatggatcaccactcttccaatcaagaaaaacacaatcgcaagaatcactttgattccaaacgagatcagcgtcggaatctgatcctgaaaccactgtacaaattgattcacatcttctgctacttcttccggagactgtactacatcctgaagttcttctgccgctaaaattatcatttgcaaacctcctgatctaatgccagaaatgcacagagatttcctctggcatctcccgcctgtctgtgagaatataagagctcgctgttacaatgtgtacacagatttgtcactgcgatgtgctctggcaaaatccctgcctcccggaaaatcagctcattggccttccagagattcagatgatatttttgatttccttttggataaaacaatgcctcccagttttctttgggaaagcctgcccgaaattttgcgatcacatcctcactcacttcataacactcctgacagatcgatggtccaactgctgccagaatatcctccggacggctttgaaattctctgcacattgtttccaccgtcacttttccgatttttccgacagtccccctccatccggaatgactcagtccaatcactctcttcaccggatccacaaaatacagtggaacacagtctgcgtaaaatgtcacaagacagattcccggaaggttcgtcaccagtccatctacatctgaatacgttcttggtttcacgatcccgcatcctcggtcttcttctgtcacaacacgcacattggttgtatgtgtctggtgcgtaaacaccatatcctcgcaccggattcccatcgcatctccgatcctacggaaattttcacgaacggcttcttcttcatctcctcttgtaaaactcaaattcaaagaagaaaaacaccctttgctgacaccgcccaatctggtggaaaatccatgttttacaagtcctgtcttttgaaacatcggatactgtaaaaatggaggttctgtattctgttcctgaaaaatctgcgcttcattcttatagcgaagtcctaatcccatcttttcactcccctgttctttctatttacattccctcaaatgcattctcaatatgaaaaagctgctctccctctatcccgatcacatcaaatctgaccggttcctctggcatctgatgctccatgatataatgctgtgcacaccggtacaaacggccctgctttctggcatcgaccgcctccaatgcactccccatcctgtttttcctccggtatttgacttcgcagaataccagatattcattgtcgcgggcaatcagatcaatttctcctgcccgacatcgataattgtactccagtatctgaaatccttttttctctaaaaatctgcccgcaagctgctcataagcagtgccgactgctctgctattttgtttcatcttctgtactgcgcctggaaaacaccacattttcaaacaaaatttttgataaaactacgtcgatggatcggtgtcggcccaaactctttcaatgctgcaatatgcgctgccgatccatatcctttgttttctgcaaatccataccccggaagcactttttcatattcttccataagacgatctcttgtcacttttgcgatcacacttgcagctgctatggagacacttttggcatctcctttgatgatcggcacctgaggaatcagaacctcaggaatattcaccgcatcatttaaaaggagccccggctcgatcggtaaatcgcaaatggcctgccgcattgcctcataagttgcctggagaatattgatctcatcgatccgccccggtcccaccattccgattccgatggcaagcgccttttcttgtatttcatcatacagcgcatctcgtttctttgcagaaagcttttttgaatcattcagatacagaatctcgcaatctgccggtaaaataaccgcagccgctacaaccggacctgccaggggaccccttcccacttcatcgattccacagatatgttcatactgtctgtacttctcctcatattgccgcatttgttttaaacgagcgcgttccactgccagcttttcatcctgtttctgatatttttgaattagtttctgcacaccggctcttgtatcatatgcgtaactttcatacaactctgttcgtgagccctgacatttttcaaacatttctttgatttcgctgatactcttcatatgcatatccctcaatttatccttctaatcgtgccggataaatccagcttcactcaatggccagattctgacccacgcacggccgatcagatcttctctctgcaggacgccaacacttggatcccggctgtcagaactgtgatttcgattgtcaccaagtacaaaatattcatccgctcccaaagtaatcggctcacccgctatccccggatccagcatcacttcttttccatagtgttcgtctgccagcacttctccattgatatagacctgaccgtcgatgacttgtattgtctcacccggaagcccgatgatcctcttgatgtaataagtattttctttatatgcataagggaacacgatgatctcataccgtttcggttcgcggaatcgataactgatcttatctacgatcaaattgtctccatgctgcagtgtcggttccatagaatgtccactgacctgtgtcctttgtcctacatatgtgatcagcaaatagactgctgccaccagaataacgatatatacgatccaccccaacagttccttccagatgcttctctcctgatctttctctttcatatcgcaactacctcttttttattcttcctcagacttttcaaaatcctgaggaaattccagtgtaattcttcccagtctaccatttctgaaatcatccagaagcagccttgccgctttttccatatccagttcactgccgcgaacgaggcaatgcctgttttttgcaatttcttccagacatacatagatatcctgatcttcattgacttcatatttttcctgaagtactcctggataactttgcgtcaggaagcgaatcaattcaccgcccaattcttctgtgttgaggatttcatctttaatcgaaccgatcaaagccagacgaagccctactgtctgatcttcaaatttaggccagagaattcccggtgtatccaaaagttccacatttttgttcagccggatccattgctttccctttgtcactcccggcttatttccggtcttggcacaggcttttcctgccagcgcattgataaatgtagatttgcctacgttcggaatgcccaccaccatcgcacgaacaggacggtttaaaattccccgctttctgtctctttctattttttccctgcaggcttcctggatcacaccttggatagacttgatcccgccgccttttctggaattgaccttgactacagaatatccccttttcttaaaatattccatccacgcatcgttccacttttcttctgccaggtctgctttgttcaaaagaatcagacgtgctttattctttccgagctcatcgatgtccggattgcggctgctcatcggcagtcttgcatctaccagttcaatcaccagatcgatcagcttgatattttcctgcatcatccgctttgcttttgtcatatgtcccggataccattgaaaatgcatagattccctccttcattattttacaaatccaaaattacttcccacgctcgtattaaaccagattttcccataaatctccgaacgctttacattcccgatgtcagccattctgctgtcatcactgcttgctgcctgatcccccaggacaaaatactcctgttctccaagtgtgatctcttcctgtgcaacccctggtttctcgatctcagatacaaagatatcctccgtctgttcttttccattgatatagactttcccttccctgatctgcaccgtttctcccggcagtcctataattcgcttgatataataatgtgcattttccctgccatttggcttgaaagccacaatatctccgcgttttggagtcatcgcattatacaccagacggttcactaaaacaacatctccatttttcaattcaggccgcatagaatctcctgcgttgctcacccgctgtccaaaataaaataccaggatcactgcaagtgcacaaacaatcgcgatttccgcaatccaaagagctgcttcttttttactccaatggatcttttccctgataaaatgcagttttgccttgtgtggcgctttttttcgcttttttcgaaatttgaagtgccgcatattttttctcctactcatttccagaatcagataacagaaaagggacaatatacacttctgtaattgtccctctcatcaatcctactattttactaattctttaaccttagctgctttaccaacacgtgttcttaagtagttcagttttgctcttcttactttacctctgcgaacaacttccactttttcaacatgtggagagtggattggccatgttttctcaacgccgattccgttagagaattttcttactgtgaaagtagctcttactccgccaccctgttttttcaggactgttccttcgaaaacctggattctttcacggtttccctctttgatcttagcgtatacttttacagtatcaccaacgttaaactcaggtgcattttctttcatctgctcagcttcgatttttctgataatttcgttcattgtgttcctccttcatcttggacgttcttaataccacttcggtaccagaggaccatctcttcttttcacaactgttgtattctatcatattttgcaaatagtttcaagcattttcctcatcttttgccaaaagttcctgtaaaaacttcatttccttcttatttaggactccacttttcatacacttttccaaaagatccggtcttcgctctttcgtccttatgatcgactgctctcttctccacttttcgatattggcatggtgtccggataacagaaccggcggaactttcttgccatgccactcttccggtctggaatactgcggatattccagcaaatcatcttgaaacgactcaaattctgcggacacatcattgtgcagcactcccggaatcagccttgaaattgcatctaccatcaccattgccggcaattctcctcccgtaagcacataatcgccaatggaaacataatcggttacgatttcttccagaacacgctcatcgattccctcataatgaccgcaaagcagcaccagttcctcttctttcgccagctcttctgccatcgtctgcgaaaatgtctgcccctgaggagaaagatatacaacacggggcttctttttcactttgtcagcaattgcttcgtaagccagataaactggttctgcctgcatcagcatacctgccccgcctccatatggataatcatccacactctgatgcttattaaacgcataatcccggatattcaccgcttcgattgaaagcagcccattgcttaccgcgcgtccaatgatactggtgcccagtccctgcatcaccatctccgggaataatgttaagatatgaaaattcatcctgtctgccctgcactttctttttctgaaatcatgaatccaacagcccctccagcagatgtacctgcattttctgtccttgtacatctacggacaaaatacactggcggattgccggaatcagcacttctccatgtgttttcgactctacaatatagacttcattggctccggtttcgatcacgtcttttaaaattccaaagaccgtttccggatcttcatccgtataaacttccattccgatcaggtctgcaataaaatattcatcttcttctaatgccactgcatcttcgcggctgacaaaaagcgcacagcctttatactgttcgatatcgttaatattgtcaatccctttgaactttacgatcacaaactgtttgaaaaacctgacaccctgaacctccagcgggatccgctcccttctggcttccaaaactacttttttgagttttttaaatctgtttggatcatctgtagtcggaaacactttgacttccccgcggattccatgtgtggatgagatcacaccaacctgtaaaaactgttccattcccttctcctatcttctctgcgaaaaagaaaaggggcagctgctttgatccaaagcctgtcccctttttgtcaagttactgtataatatcaacaacaactttcttatcttcctttgccgctgccgcttttacaacagaacgaatcgcttttgcaatgcgaccctgctttccgatcacttttcccatatcactgtcagcaacacgtacttcaaggaccgtagttctgccgtcctgtctctcagaaactgcaacgctgtccggatcgtctactaatgctttcgcaattacttcaactaattctttcatttacgcgcacctccgcgaaacagcttatttttcgattccagccgccttaaagatctttcctacaacttctgtaggctgagctccgttgttcagccattttttagctgcttcttcgtctactttaaatacgcttggttcctgatttggatcgtatgttccgatttcctcaatgaactttccatctcttggtgctctcgcatctgctacaacgattctatagaaaggagctttcttctgtcccattctttttaatctgatttttactgccattttttccacctcttcttaaatatttttcttttttttgttatctatgtgctaaaaaggaagcttgaatctgccttttttaccaccttttcccatcaatcccggaagtctcttcatcagttttctggactcattaaactgttttaccatacggttgacttctgaaatatccacgcctgcaccttttgcaatacggtgttttctggatggatttaacagatccggattctgtcgttcttcgaccgtcattgactggatcatggcttccatcctcgccattttcttttcattttcctcggagtccaattccggcatctttgcacccattcctccgagtcccggcatcataccaagcacgctggataaaccgcccattttcttcatctgattcatactttccagataatcttcaaaatcaaactgagcctttttcatcttctctgccatctgctgcgccttttcttcatccagctcagcaccagccttctcgatcagtgtcagcacatctcccataccaagaatacgggacgccatacgatccggataaaactgttccagatctgacagcttttcgcccatacccacgtaaagaatcgggcatccggtcactgccttgattgaaagtgcagcaccacctcttgtatcaccgtcaagttttgtcacgatcacaccatcaattccaatcttgtcattgaaacttccggccacattgaccgcatcctgtccggtcattgcatctaccaccaaaatggtctgatgcacatccactgtctctttgatctcctgaagctctgccatcatatcttcatcaatgtgaagacgacctgcagtatccaggattacaatgttatttccattcttgcgcgcatgctccaatgccgcttttgcaatgtctgcaggcttgtttttgtctcccatggagaacacttccacaccctgcttctctccgttgatctgcagctgtttgatcgctgccggacgatatacatcgcacgcaacaagcaacggtttctttcctttcagcttgtactttcctgccagctttgcagttgtagtcgtcttacctgctccctgaagtcctgccatcatgatcactgtgatcgcacttcccggctgcagtttgatctctgtcgtttcagaacccatcagattgatcagctcttcatttacgatcttgatcaccatctgccccgggttcagaccattcatcacgtcttgtcctactgctcgttcctgtacatcttttacaaacttctttacgactttaaagtttacatccgcttccagaagtgccatcttcacttctttcagtgccgccttcacatcatcttccgtcagacgacctttgcttcggagattcttaaatacgttttgaagtttttctgttaaactgtcaaatgccatgctataactcctctataattgtatccgatatcttccggatcttctctatcatctcttgcggtttctgacttccggcaccggactcataaccatccagcacactgtcgatctcgtgaactttctctttgatcgaaagaaatttttccaccagatgaagtttgttttcataaccttccaacgttttctgacaccgtttgatcaggtcatggactccctgccgactgatcccagcctcactcgcaatttcactcaaagacaaatcttccagtacaaactgctcataaatctctttctggtgactggtaagaagttcaccgtaaaagtcgtataacaatgcctgttctaaaatatcattcactcaaatcacctctgctatcatagcgcaaaaaaggaatggtgtcaagtattttttcttgacaccattcctctggaaatttttcacaaaaatgcacccatgtccaacagcccccaccctgtcccttcttcattcaatgcagtacatgactctctcagtctcagctttacttccacatttgtcatatccgggtactctgacaacagacacgccgcagctcctgatacgatcggagctgccatggaagtcccgcttttctccacataagcctttttctcctgatggatcctcccacagcttataattccaagtcccggcgctacaagatccggttttacaatacaagcatccgatggcccccttccggaatatttccatcgctgtcccgtacatacttttccacgtctgatttcctcatatgctccgactgtgatgattttccggctgtctcccggagaggccacactccccttttgtggtccgtcattccccgcggatgccaccacggtaattcctgcatcccacagagattctgcaccaagtaccagcctttttttctgtttctgttccagatccggctttgcccctacggaaatattgacgatccgaatagaatattgttttcgcacagaaagtatccatcgaattccctctaaaaccgtttctacacttccatttccctcctgatccaaaacttttcctatcaaaagtgtagctcttggtgccatccccgcataaacaccatttgacagcctgccgtctcctgccagaattcctgccacatgagttccatgaccactgtcatcgtacaactcctcttttcgatgtacaaaatcccgaaatcccaggatccgatttccaaaatccggatgtgcacagattccctcttgtgtcaagtagttgcaggcaattttcttttactttttttacgattttattaggtttttcaacgcttttgcttccaactatctactttgtgttaaataaatgctataaatcatcaaaaaacgttgatgaataaatgcaaaattgctttcttcgtcaaaataatcactaaccctcatcaaaacatcgtcattcaaatcaaattctcttaaattaaaaactttttctagcactctcatattttatccttcaaattcatattcgtaatatatacaattatacgtctgttaatctccttgtaaagcaaaaagcaagtcattttcagacttgcttttcatcatgctttattccctatcatttccccctactatcccatagctactcttttccatcacgaaaattccagataatctccatatgctgttcatcccatacatgtatcttctttatgaaagtatctaccacctcttggtttagttcattgatcttacattctttccaaatgatatgcgtatccggcagttctgcatgaagctctgtctccacttctgccaatcgcatctcctgctcttggatttcactttttataaaatcttcctttttctgcaattcctctctgaactctatatattcttcccttgagatttcccgctttccatatttctcataaagtgtgatccgttcttttcccacaacatctaaggctttttgagatttttgcaatttatcccttttcacatgatacttctctttttgtacttcctgatactgactccacacttcctccaattccatctgtctgcgaatttccttttgcaaagcagatagaataacctgttccaaaaagaatacattgacttggctcacacaattctcatcacctgtcgtataacgttcattacaataaaaataaggattttttgctttacgataacgcaaagccttaccacactctccgcatacaacctttcccatcagaatatgtgctttttgtggctgataaggtttcgatcttcccctcgtctgctgtactgcatcaaatatttcccgttcgatgattggttcatgatgatgataagtaatcttccattcacttcttggctttaagtgattttttcctccaaccttatccttcttatattttccatataccacatcccccgcataaaaatgatttttcagtatcgtacagattgttgtatgctgccatgaaaattccttgccaactggcttccggtgcgttgctcctctctctatcagatattccacaggtgtttttaccttttctttatgaaacttctttgcaatgtccaccgaagtatatccttctaatgtcagtcgaaaaatttcccggacaaccgctgcctcctcttctacaatctccacttgatttctgtcatctgcttttttgcgatatccaaagggacagttcccgctgcaataaatcccccgttcttttttagaatgtagggaagaagtcacctttaccgacaaatccttggaatagagatcattgaccagcgttttaaatgccagattcatcccaatcgtttttttagtgacagcttcactatcataatgatcattcacagagataaagcggattcctaaaaatgggaaaatctgttctacataggaacctgtttctacatagtctctggcaaaacgtgaaaaatcttttacgataatacaatctacttttttctgccggacagaggctaataattcctgcattgcaggtctgtccatactggttccgctgtaaccatcatccacaaattctaaaatctcatgattttcaaaatttcgctctatatatcctcttaacaacaaacgctgataagaaatgctgttactctcctgtgcattccactcatcttccctggacaatcgcagatacattgctatcttcagtctatttttcatcgtctgttcctcccatcaccttggcaaactcatccttccacttccagatgatctctacccgttttccacgatacacataaattttctctatcaggtttttcaccagttccgcatttagttcggcacagcttttgtacttcaaaatagtacggagaaattgattctgcttatctaccattctgtcaatggaagaatactctgtatgtaaatcacgtaatgtctgccgatcctgttcctttttttcttccagtttcttctttgtttccaaaaattgcacctgtgaaatgcttccgtttcgatactccagataataggaactgatcttcctgtcagcaccatccaccgatttttgcagttcatcctgtgctttctgtatctgttcttttcgtttttctcctgcctctttatgaaattccatcagttttttcatctgtgtaccgcttaaaagaaactcttttttcagcaaatgaaggatcactttctgaatctgaagaaatgtaatctgttcattttcacatttctcttcatcaatccgtttgctattcggacagctataaaatacaaatgtttttacttctttataagaagcctttctctccgtcaccatacggcttaacttatgcccgcactcgccacaatacaaacccccacggaaaatatcttccatcgtatcctttctaagtggtctgcggttttgtattttaatattttcttctattctttcccatacccgataaaatacttcttccgaaaccagaggttcgtgggtatgttccgctgtaatctgttctttcatgtgcttaccggactgcacaagattccctatgtaggcatcgttggttaatagaaaccggatagattctctttcccactgtcttaactgctgcccctcctgttgataaaccattttgtattttttataatcgcttggacgatgaatcttttgcccatacagccatcttgcaagagatacaaatgtctccccggaagcataacggttaaagatctccctgacaatctcactggtcacaggttccggcactaaagtccgttttccatctatcttttcgatttgaaaaccatacggcggaatgctccccagatattctccctgtttcatctttgcctgtttacttgctgtgaccttttctgcaatgtcccttgcatacagctcattggcaatatttttcaaatgcatggaaagcgcttcgttgcagtccgcttgtttaatgctgtcatactgatctgtaatggcaataaagcggacacccataaaagggaaaatcttttctacaaaatttcctgtctcaatataatttcttccaaaccgtgaaaaatcttttacaatgatacagttgatcaatccatctctcacatcttgcatgagccgttcaaaatcactccgctgaaaatttgtcccggtagctcccaaatctgaatagcagtcatacagcgtaatctctgtgtgggattttaaatattctttcgccatctcaatctgcgtttcaatggagatttctttcccgtcatgatgatccacggataatcttgcgtaaatacctgccatgtatgttttcactgatacattttcttgcagtgattggctttctaaccgaaccttacgtttggatgttcttgccatttagaccacctccttcacgacttccgattgggaagaaagaaattctgacaacaccaacattttctccatttcttcctgacaacaaaactgtaccgatacttttttctcctcgtacacttctatcctgtctacaaaggctaatagggtatccctgtctaatgtggtaatctgcatggtctctctcaggcgttccagcttcacaccggacttcactccattataaaacagttgctttaacatatcctcctgtcttgtcaacgctttctctgtttctacatactgcttttcatagattgtgctaaaattcttaaaatctgtctgtgtgatgattcccgttttcaaatcttcataaagtcccgcccgcagctccagatatttttcctgttcattccttaatcgagcaatctctttgtcaaatccgaccacatcctcaaagttcatttcttttgtctggagatactgcatctgccgatttacatcaatcagaagttcaacctgggactgtatgatccggaataccacttttttcaaatctgcttctgaaatactgtgtctgctgcatccctcactccgatttctcgtagaacagatataatatattttttccgttcccttatatcggttcattcgacgaaccatcggttctttacagtctccacagaagagaagtcccgaaaacatgtgcgctttttcttttcccttcccggctctggtatcgacttttaaaagccgctgcacattttggtaatcctctttggaaacgattgcctcatgtgtgccttccaccttaaaccactcagactctggcttttctaaaatcttatctaccttataattgactttctcccgttttccctgtaccatcgtcccggtgtaaatctcattcgttaaaatacgctttaccgccaccgcagaccatttggatacgattcctgcatgaaaccctgtggcataatgttctccgtgggatttcttatattccaatggagagaagattccattctcattcaagcgtttcgcaatggcaaggttgctcatgccgtccagtttccatgtgaaaatatttttcacaatctttgctgcatattcatctatgaccagcttatttttatcttcatggtctttctgatatccatagactgcaaatgccccgataaatttccctttctcccgttttattttctgatgtgattttaccttttctgaaatatcctgacagtaggaatcattcacaaagtttttgaccggaatcacaagagatgtggtactctggtccgcagtcagactatcgtaatgatctgtgattgcaatgaaacgcacagaaaaagccgggaaggtcttttgaatgaaccgcccggcttcaatataatctcgtccaaatctggataaatcttttacaacgacacaatttacatttccattttcaatgtccaccatcattcttttaaaatctggtcggtcaaagttggctcccgaatatccgtcatcaatataaatatcgaataactccatatccggctgttctctcacaaaggaacgtgccagctctcgttgggatgaaatactgtcgctttctcgttttgcgctgccatcaatatcttcatcatctctcgacaaacgaagataaatcgcagtatgataacatacatttttctgcattttgcttcctcctgattttactattttgatttcagtcagtcgaacctgtcctacgagattctttttttatagtaatttcaggatttcactgttttgtcctgcatctaaattaccatgacatcctgatattataaagagtaaattcaactttaatatttcgtttctgcaatttttgaaatatactgtttcatccggtcattcagcgtctctttacagtcagaatatccaatcttcacaacatactcgcccacccggacaagataagggttatgtacctgttccacatactctttcactcttttttgtactgactgtttcgtatcaatctcaatttcactaatatccacaagctcatctggatttacttcttttatatttacacgcttcaattcctgcaaagttttcccatccaaaagcataacccccttcctatttgagattctatgcgtccagaaacttgtctcattctaaaaaacatttttcttttttcaaggttcatccttacataaacccaatcccagcgcatgaaaaaaacaagcatcgaaaagattttcttttttctgcttgtttcttaacctctcccaaacagggttattgaaggggaaaaacatttcagagcaagattcgcctatgtccgacaataacccgtttccgggtttttgcagacttggcatttcttgatggggatttcgatctccgctccgctacggtccttgctaagcggatgtccaccggacatccggcaccccattccctcgatataaaaccatgcaggatgaaattcaatcctgtatctctgaactttggaatttaagaaaagacgtgacaagaatgaaaagaacgaacctctaattccagaaaacaattaaaaactgtggaatcagagttaaagagcctcaatcaacaactccactacaccggacagtatcttgcaactaaatctgtctatgcacaatttcgtaaaagcaaaaataagcagaaattccgtcaggaacattctgctgaacttacactttatgaaaaggctgtaacatcactgaaagagaaaaacgaaacacagccacttcccacgatgaagcaactgagagaacagaaggaaaaacttctaattcaaaaagataccctccagaaacaatacgactattaccgaaaagaactacatactgtatgtcgtaacgtggatatgatacttagatggaatcctccaatccaaaactgcacataccaaagaatttcaattataaaagaagtctcctcggtcttttacagatcgggagacttactttcttaatggttgatctgaatcaccttgctgtattcaaacaaaacagtgccttttgggagcattactacaaataaagaaattataaatataaagtaagcttcctcgacctatacaaattggcaggcttaactcacacgaaatatatttctattatttcagatgctattgatcttttttttaatctcatcactactatcatacaaaatcatgtattatttacccagtcaatacatatactaccttagaaccttataaccttttgtaaatctcctgtggaagattccctcggaaacagttgacatttttacattggtttgttatattaggttcagtgatcgtgttgcggaaacttgcgaagcccgtgaccgggggagagcctgcgggtctctccctcttttgctatataggggtgaatactatgacgaaaaaaacatttgccagctttgagcagcaaatacaacatttaaaggacaaaggaatcatcatatctgatcgaacttatgcagaagccatgctcaagcaaatcggatatttccctttgattggtgggtacaagcacttattccgagttccttttaccaaaacctataaaataggcacaacattcgaggaaattgttgccttatatgaatttgactctgatttacgagatttattctttaaatatttactccagattgagcgtaacctccgttcacttatgtcctattattttacagaaaagtatggggaatcacaggacgcctatctgaatagttcaaactataacacgaaccgacgcaatcaaaaggtagtatctcgactgatttccacactaaagtatgcaacgaatactaccgattatgaatttatcaattaccagcgggatacttatggaaacgtccctctttgggttttagtctctgtccttacatttggtaatctttctaagatgtataaggtttttcctcaatcgttacagtcaaaaatctgtaaaaattttggaatcatcaaccaaaaacagatggagcaatttctatctgtactcacaaaattcagaaatgtatgcgcccacagtgaacggctctttacatatcgcacacgagatacgatttctgatttaccactgcatcgtaaactatctatccctatgcagggaagccagtatcaatacggaaaaaatgatttatttgcagttgttatcgcttttcggtatttactgcccgacaaagatttccgtcttttcaaaaaacgtctggcaaagtcaatagatgatgtatcggaaaaactgatccacataaaacatactgatttactggaaaaaatgggattccctgaaaactggaaaaacattacccggtatcgcttaaccaaataattatattcatagtccatacaccaacagtaccagcaaatttatactctaaccaccttgagttatattattgcaaacctccttttcaccactatattttgactctgataccggtactcatcatcaaaattatcatagtgtttcttattttttcgtaggacaaaagtcagcgaaacccttgtatttactgttctttctaacttagcattataataactcattcccctgtatccaaaaccgcgatgcagattccctcccccagggcattccctcttcgaatctcttcacaccaatatccgatgctctgctttgcctgtttcatttctaaacattccttttttatcagaatattcatatgctttgccatacgtgtttctacaatggacatgctgattttttctgggacaggatcatgttccagaaaaaatatgaatcttttttctgcacacatttcccccacccacatattatagaactgtaaacaacattattggaggatttaaaatgagtgaattaagtgcaacaaactgcggatgtggatgcgaatcaaactttggcgggaactcctgcatctggattattctcctgctgctctgctgcggcggatgcggcaatggatgcggtagcaacggatgcggcaatgacagctgcctgtggatcatccttctgttaatcttctgcggcggatgcggcaatggattgggaaacagtggatgtggatgcggcaacaacggatgcggatgctaatctgcttctgaaaaaatcccccggttcatcgaaccgggggattttcaatgttcttccttttttacacagatggcttcttctcttccatcttcttttttctccttatccactctgtgtttcaacatgcagttttcatctatttcgtataccgcatttccgtcaataatcaattttcgtttcattcaaaccctcttttctattttcctttctttatagtatgatgccaaacagaaaaagtcattcaggttttcattcatttttacccatattttctcatatatatttacaacgctacataccgggaggacttatggaacaaaatccgacgcatcttatgacaccttttgatgaattgacgagttcccgacaactgcagacactaaagcttctattgccctatcttccgattgacggacaacgtatgctcggtattttcatccgtctgaatgaactgaaaaatgcgattctccaatttcgtggatttccgatttccagttattccgatacgcattctccaaccaggatcttaaatgatctttccccatacctctccaaagaagaagcacagcagtttgaacagatcagccagctgcttcagatgatggagctttttcagaacatgccatcggacagctccggcagtttttcccccgattttttcatgggaatgctaaacccggaacaaaaagaaatgtttcaggcatatgatgctatgttttccgatacaataaatcaaatgaatgttacagcttccaaaggagggaacacacatgaacgagtggatgaatcatcctcaaatgcagaacatggatccggtcaagctagagctgattaaaatggcggctgcacaaactgccggaaaatccggcaaagatcttgcgccgatcctgtttgcactgatcaccaatgccggaaaacaaaatattcagttttctgctgaagaaatcactctgattctcaaccttttaaaagaaggaaagtctgaaaccgaaaaagcgcagattgaccgcaccgtcaatatagctgcatctatgttaaagaagaaggtttaatgccttcttcttttactgttcattgcattctttatcatcttcctgtacaatattgaactataatcagatattcaggaggattctctatgcagacgctcatgctcacaatcgaatatgacggcactcgctatgcaggctggaaggctgcatccaaaaaaggagcgtccgaaaccatatccgggaaaatccagaccgccctctttcgtctcctcggagaagaagtctcgttattctgtgctgccagaaccgatccgggggtacacgcaagaaaacagattctcagctttaagactgccgcggccattgcccctgccgttttaaagactcgtatgaaccaggtgcttccacaggatattgccgttttggatatcagagcagtttccgaccgttttcacgcagaactgctgcccaaacgctgtacctgggaacttgatatccagactggttttgctgcggatctgtttcgacaaaaatatctgctattccttcctgctcttccagattctgatcggatgcaggaagccttttcgctattagaagggacacacgattttcgttgtttttctcctgtcaaaaagaaaaaggcggttatgcgggaattatattctctgcggatagcacaaactcaaaatgaaatgcagctctttttggaaggaagtgactttcttccttttatgccagcaacactgatgcagctgctgctcgatatcggaaccggcatcctggatacatcgtgtatccccgccatctattccggggaattttcctattcctgcagcacttctttaaaaggcctgtatctcgccgatgttttttatacttcacttggaaaggatgattgatcatgtctatttactatagtattttatacttttttgtatacggcttcctgggatggtgtaccgaagtcattttcgctgctttcaaacagcatcgttttgtaaaccggggatttttaaacggaccgatctgtccaatatacggagtcggagtcacactggttgttgcatgtctggaggcattccagtccaatctgcttcttttgtatctttcttcggtgatcctcgtaaccattttggagggtgtaaccggatgggccatggacaagttatttcataataagtggtgggattactccaaacttccactgaatatcggcggctatgtctgcctgctattttctctgatctggggtgttgcctgcgtggtcatcgtatattttatacatcctctgatccatcagatgctctcctggatcccccatgttatcggactggttctgatcgtgatcctcgcagccgcactcattgcagacattattgtaacatcatctgcaatcctgaaattcaaccagtatctggagcgactgaaacacattacagatgaactgcatgaaatttcggatcaaatcggagaagaactttatcaaaacgcaatgcgtgtgctggatgttcaggaagaatccagacaaaaactggatgatgtcaaattggaaatatccgaagaaatccggatgcagatcgtagaattaaagacaagagcccagaacctgggagaaaaggttccaaaaccggcacggcgtcttgtcaaggccttcccgaaattggaatccagaaattataaaacacagttggaactgtttcgtcaaaaacttgagcagcgtcttggcaaacactaagagaaaaaccaggctgcccatgcctttccaaagaacatggcagctgtcatacccatacataaaaacgggccgaaggcaaacgatgtcttccgcccgcttttcttttctctcagcaaatacacgcaatatcctccggcaaacagaattgctgccatacttcccgcaacaaccgtctgtacaccaagcgctgcaccgacagccgccacaaacttgatatcaccgccgccaaagcttcccggcacaaggaacacgatcactgccataggaatactcactgcaaatatacccatcaccctctcctgccacgaaacagaagcatctgtcattgcaagaaggagtgcaagcaggcagatcgccatattccattgatctggaatcttatgtgttctccaatcggaaaccgtgatcctgacaaaaagtaaaagcagcaccactttgagtaatacagccatcatgcctttcccgtgtagtacaactcgatcggatcgatcggatcgatcggatgctcctcttccattttgacttttcttcccctgcgtttgatcaattcgccacccttattatagaaccagaacgaataaaccagcactttattgacctttccgatcctgtctttggtcgtcttttcatactgtactcccccaacttcaaacggaactttcttatggatcatggagatcaattccgtttcacatgtcaccggttccggcaaaattgtataagcgcgtcccacgcacccggttctgtgagaatcgcttcctccggtcgttacttttttatactttgccgccagcctcgctgctcctgtatttgatgctacagattcacaacaattgtatgcttctataaaatcaaatcgcttcatgatctctggagactgataaaatttctttgtattcgcgatactcatatatttttctccacacggatgtgccggcccaagcactccgccgttgcgatgaacaagatcgatcagtaccgacaccggcattccccgcatctccaaaagacgcatcttcaccccttccggcatgattaccagaatatgccctgcatcccttgtatcatactcaatcccttttaatactacaaaatctgtgtggacctttcctttcatatggtttttccaatatcgatatccgttgtatgtattatgatctgtgatcaccattccctgaaaccccttctttttcaggagtgtgatatactcttccagactcactttactgtcaatcgacccttctttcacatgacaatgcatatcaattttcatagataagcccccttttttgtctctgcatgctcacacgcacagaccttgtctcttttttctattatacctcgttgacatttttcttacaacaacgtccatgaaaaaacacactcttcccaatgctttccagcttgagaaaagtgtgccttttatacttcgtcgtcttcatcggacagatcgatttccagaatctccacatcatcgtcttcatcgtcccagaactcatccatctctccatccagatcttcttctatatcttcttctatatcttcatccatatcttcatcgaattcatcacagtctgtgataatctcctctgaaacactcaaatcttcttcctcgtcaaaatcctcctcttgaatttcttcatcgagaagcgccctcgccttgtctacttcattctctgtagaatttttctcacggatttctgccgcctttttcaggtgtaacttttgacgtcttctagattccatcaaaaactgtaccaatactcccaacactgccaaaatcacaactatcagtgtgatcacccagtcttctaactttatccccacattctccaatagattcgcccctgcccggcttatacatccggctccagccacacctgtaagaagaatcagaaccggaactgaaagcttgattgtcaaaagtgcgcacagcaaaccaattcccgcacataacagcagccagatccaatccgctggccggatccaatatgcactcatcatagttccaaaaacaagtgctgtcaaaaatactccggccctctttaaaacagcgaatacaattgccaaaatcaatccaacaccgagaccgattatcgcgctgattctctcattctccataaaataaaacgctgctccggcagcaatccctgttcccgtcacaaatgctatcaaaaatgaccagaatcttaccagcctcaatccaaaaaaagcactcaaaatgccaagtagtacaataacacctaacgaaatcataatgatttctctaaaactatctgcaacaccaagctgctccaggactctcggcagaatttcttcctcctgcagccatcttccgatttcactcatcatatccattgtacctctcctcaatatatgaatttttcgatcagttactgttctcaccaggtgccggataaaaccgacaacacttatagcaacctatattttaccaactttttcagaaagatacaacagaaagatggatgcaaatcttttcttctgattcacatccatctttacgttgttggttcaatcacctttttctacctctcttcacttatcgataagttttggttttaaaatttactgtcctggtggtctgtaccttcctttcttaacaattctcatttctgcttcctcgataaccttacccatcaaatgaattttacttctctcgtaactttctcgtcattacgataatttcttcattcttatcgattatctttcctcgcatcgaaatgagtggtcacttcttgaacttttctcaaatccgagaaccatcttttctgaatttctatccttccgtactttttattctccccctgagaatcttgttccgggacttctgcttttttaaggcttcgtcactgataaaacttctttccaagactttctattttggatttaagtctttgttcaatctgttttatttgttgactttatattaacactcttttcatgctttgtcaatatcatttttagttttttatatattttatttttaattttctgtctttttatttttattctttaattttacagtttaatctcactttctcaaatatcaagtttccattaattgcagaaaatccgaaaggacttcctataaaaaagacttcctttcggactttctcacaactgagcaacactcttatttctatttgtcaaaaattcttcattacattctggatcactgtctcccgaagctttcctgcctctgtgcttccagtctgatgatctgcatatctcgcttctatatagagataatccgcaagtctgttcacatactgcatcgcttttgcatccgccccataattctgtgccactttccgaaatctccgctctgcacgccttgtcaccgcccttgcaatatccagtcttgcagaaagctcgcatccaccatacagcacaaaatccttagttcttggaaatgcagcctccagctcatcaatctgtgtttccagatatgctgtttcttccgttgtcatacggtaatccagatttctcggatctgccactgctgccatgatcttcatcaaatttctctgaatctctgttagattgttttttaagcgttcttccgaaagtaccttggcgtgaccgatatagctgttcaattcatcaatcgttcccaccagttcaatccgatcatccgcctttgaaacactcattccatttgccagagaggtgtttccgccatctcctttttttgtgtatactttcattgctccatttcctttcccggaatttttatttaaatggctgttttttaattgcacgggcactgtttgctccgacttttctgcactgttcctttgtcggggacaaatatgcctctatattcctacctttttccagtccccgcattttcaaacagattgccgttccgaaaattccgattcccgaaccaagcatcgaatccctggccgccttatacgccagtttctccatacattcatccggaaattcacttctttcatagaatacgccctcttcttccacacctgcgcaaacttctcgcaaaactgccggatctgcctgatgcgtataaataaaaatggaaggtttctttactatcattgctgttctcctatatacgataacaccagacctgtagccaccgcatttcgcggtccttcttctccacggatgtttccacggccgcatacaatccgaaattctgccagctcttccatcagcatctccggaatttcaaaatcctctgcggaaccgccaaccagaacaacattcgaaatgtttttcagatcctgtcccggcgctaccttgcgcagcgcccgaaatgcattcgtcacaaatacttttttctttgcctctcttcgaacctgcacgatcttttccattgggatatcctcttccaaacgaatcattccctcttccgtaagaagaaccactcttccgtaaaacctcggatcgatggaatgatccacaaaggtcatctgcccattttccatacgcatatggaacaagctttcaacctttgcaagtggatattttttgatctgttctgccatatgccggtctcccagccctaactctgtctcaatgagcatggataccagttctcctgcccctgcctggtgcgtcatggatacttttccgtctcctgaaatcacagctgcgtctgtagagccgcctcccatgtccaggattgcaagcggcagactcgttcccggagttgtcaatgcacccagacttgccatcaccgcttctactccggcaacgactacctgcactcccagttccattcgcagctggtcggcaatcttctgcatcggaagatgctgggtcttaaccattgccgcaattccaaccgccttttccaaacaagtctcacctgccagtgcaccggaaatcagaaccggtgccatcgtatccacagccagaatgtccgtaatgtgaatctctgcctgtgcagagtcatccagagtttccattccctttttaattctggcgaacatatttcccacattggtatctggctgtccttccatatcatagatggtaccggcatctgagatcacctgcatgatcttttccgcgccctcgtccagatttacaacagcatcccgactgccatgcagatagatttctcctgccgggagcagattctcccgaatattcccacccggtgtctttaagacaacggcactgcgctttccgatcagactcttggcaatcggtgtgatcatccgggtctgctctgcatccaatccaagcagcgtcgcaatcccatatggattggacaacatccggatcgtctggccggcaagtgctacttcgatcgcagccggtacgccctccggaagtctctggattcctgccacctcatcaatgatcggtactttctcttccagacgattctccacaagaacagcctcatctgcctgtaaaatcaccccggtaatcttcagacgcttcatctcccggttcaaaaccgctgcaatctcttcataagacacatctgcttttgcaaacacgatatacggaactcccggcaccccttgctggatcttctcaaatgccagtgtttctcccaccgcctgtccgacacctgccggtgtagacggattatgaccaatcattgacgaatccgtaatgatcgtctccgtaagtgtctccattgccgtatctccaataaccggagccgcttcgttcaaacggatcaaagacagcgcttccatctccattccgatctttcccatagcgtcttttaaagctgcgcggattccatacacattggcaaccgttccttttgtccctgtcgtcttgcaggaagcactgctcagaaaatgaacctgagtcccctctacttccccaatacagacttctgttgtagaatttcctatatcaactccggcaatatatgtcaaagcaggatccctcttttctcataaacctctgccgcttccattacaaggcgcgcacagttttttgcattgtatttttccagaagctcctgcgccatcaacaccagttccagttttgtagaacggttcgggcgaagcttatcatacatctttaagatcacatcatccggtacatccaccagttcagcagcacgttcaaaattcttttccatcgggtcatttccattttcctttgctacctgtccctgtgcatagagcatttcttttgatatcttaatgtcatccggagcgatctgattcttcatcactgcatccaatgtgatctggtccagtttttttcctgtcttcgatgcgatctgttctctttcgtgttcacctaacgggtactgcatttatctttcctcccattcaacaattccaacttccggatccagctgttctgtctccgcaatatgcatcaacgccgccttgacctgatatttcggtctggacatcggatcattggtacacggaatcggtaccacctgctccccttttacatattttgcagcattctttccgatctgccggtatgtttccaggttcataagcggtgcctgcggaaacaactccagattggacagcggataaagatctctctgatggatcacggtcgttcctttggactgaatcccgattccgattccggaaccggaaagctttgcggcctccaatgccataaagcagacatccgatgtatccaaaatcttcaccacacgaggaatcattccttcttcctcaattcctgcttttacatttttcaaaacatcttccagcgggattccacagatcgtccgcctgatctctctctggaaagcagcccctaccccgatgactacttccttcggatcggttccctgctttgcccgcggatattctctgtaggacgttttgacttcattgattctatcccgccctgccatagaaggcacttcagaagaggactgcactgcagtttcctgtcccatctctgaaagaacggcattggttatctgtttaattaactcttcactaatctgcatgttcctgcctcctatatatcctgtgggttgataatatgcgggattttcttgatctcttcccagcgttctccctgtacacggtatccagttccaggtcccatataatcattcggcgtattgatgccggacagcacatggaaatccttgtccagaatagcagctgtctgcatataatcaccgaccacacgctgcttgagcatgttcaaaacactctccgcaacgtctacaaatccggtctccgccagtgcttttacaacgtcaattcctgtgatgccccgctttaatacatcttcagctgccatcagatctgctgtcacatcacgatccagcgtatctttacttccgtgtgcataagtcactgcctctacctgctcatctgtcaccggagaaagtcccagttgtgtgaatacggcctgaaccgctcttgcagctttatttctgacacggataacctcttcttccgttaccggacggaggcctccgtctacctgcatatctctctgcaatacgttgtaatcatcaaaatcttctgcatcaaagttcgaacctgcaaacatattgtcgtaattcggctccgctgcataacctgaaaagataaagtctgttcccggcaaaaactgcagcatcgtccttgcagtgcggcgcatatccgaattggaaaaactctggtcattggaagatgcacattccagtccgagcaatgcagccaccagattctctgcgatcacttcccggataccggaaggaaccgatcctgtcacaccgatacagcttaccgatccattctggattccctgacttcccgctccttttgtagcatacaggcagcggcattccagatacagcatggatttcttttcgctgcttcccatcaggacttccgaaccggagcccgacgtaaagcggactttcagtcctctggatgcataggcagaatttaaaaatgccttggaatatggagtgtcatctccatcgataaataccttctctgttccatatacagaaagtgtctctgcatatgtagtcagcccacggatccccagttccagctccgtagcctcctctgccgagcactgtgtcagtacacccgggcgtcccacctgggaaccaatcaaaagcgccatcgcactcagcggtgcataccgtgcaactcccatggtcgtctcttcttccgcaaatcctcgaagagctccctcagctgcatcagctgcaatctgtaccggatcatctttcaggttcgtaatatgtgcctgatttcccggcgttcttcttgcacggatcttctgcatccccatcatcagttctaccacattcagatgattcataacctctgtcatctttgcaggtgtgatccctgttacaagctccaggatctcctttctggatacgtggatatcaacgatcatccgtgcgatctccaatgaagaaacggccatcgatgcttccgcacgttccacattcatcgcataatctgcgatgaactgatcgataaaatcaaagtcctctcttttctttccatccagttctacaattctgccgttctctacttttacagacggcttgggatcatacggacttgtcattgccacaaatcccatctccggccattcattgatatatccatcaagatttaccggacgctgatccagggtttcaattcgttttgatcttttcatgcttcttctcctaaataaatgatatctcctacacacttatagatgtattatacctcaaaaccaaaagaatcgcaatcgaagttcttcatatttctgcaagaaaccacatcttttttctaaaaacccaacaaaaaaccacggattccaggcaatttttttctgtgatttttattttttccggatttgcccgtattctcccattgacttccattttttcggactgtaaaatagacctatctttttatcaaaaacaatatttacaaagcttacttacgaaaggagtttggcatatggaacacttaaccatcccacaggggtatcgttcccccctgacaatccgcgagaccgaggttgcgatcaaagagatcaaggatcattttgagcgctcccttgcaaaatcactgcacctcacccgcgtatccgcacctttatttgtaaaaccggaatctggtttaaatgataatctaaatggtgtagaacgcccggtttccttcggaatcagggaacaggatgacacacctgccgagatcgtacactctctggccaaatggaagcgctacgctctgaagcactatggatttcattccggtgaaggcctttacacagatatgagtgcgatccgaagagatgaggatactgataacatccactcgatctacgtggaccagtgggattgggagaaggtcatttccaaagaagaacggaatatggagactctgcagtatacagtccgcaaggtctacagcgccctcaaagagaccgaagattatatttccagacgttacaactatatcgaacctctcctcccggatgacatcttctttatcacttctcaggaactggaggacttatatccggattgcgattccaaagaaagagaacaccggcttgcaaaagaaaaaggtgccatctttgtttctcagattggaaaagttctcgcctccggtgaaaagcatgacggacgtgccccggattatgatgactgggagttaaacggcgatatcatcgtctattatccgatcctcgacatcgctcttgagctttcttccatgggcgttcgcgtagatgaagaagcacttgccagacagttaaaactttccggatgtgaagaccgcgccaatcttccattccagaaatcccttctgaatcaggaacttccatacacgatcggcggcggtatcggccagtcccgcatttgtatgtattatctgcgcaaagcacatatcggagaagtgcagtcttcgatctggccggatgacattttcaattgtgcactggagaacggaattcagctgctgtaattaaaaacgggaacctgctgatgcatgcgatcagcagattcccgtttttctattctttccttttcaccgcaacagcctgcatatgctgtgctttatgtctgtcttttacaagttccctggaataacggatcacaccgttattttcatacggatcattaaaataatatccatcgtcatcatatccgacaagcaccatgcagtgttcgttggaaatccaggtaaatgtctcttcacgatcgtttagtttccactgtgggcctgtgatcggttcccgcatattaatgcaggcccagaagatcaccggcatccctctgtcaagatattctatctgcagaatttccggctctgtccctgtaagatccaacacatcatatgtatccccgagcactttcctcagtgcctgtacaatcaccggtgcataacacccaaaagacgcttcatcataaggacttccacaaaaatattttcgcggatccggtccatagagaaccccgtttttctcttccaatggctgcttttccagatactcctcaataaaagtatccacagaaatctcatatcccagatattggagcagcatcactgctgatacgctctcacaccctgtcggatactttacgctctgatccaaatagggcacatcaatgatcttacgcatgttgtccctccgcatcttttttctgttcccgttttttcaaaatggtcagcactgcgaacaagatcagcagactgcttccaagggcaacccaccagattcttacgattccggcgatcagataaccaaacacacacaccgctgccacgaccagtgcatactgcatctgtgtcgatacatgattgatgtgattactctgtgcacctgcagatgacatgaccgttgtatcagaaatcggagaaatatgatctccgcagaccgcacctgccaaaactgctgctaccgaaatgatcatcatttccagatttttttgtcccgggaacatggcaaccacgatcggcaccagaatcgcaaaagtcccccaggaagttccggttgaaaacgccagaaagattgcgatcataaacatcactgcaggaaggatcacactcgcagacgcattgcttcccaccagattttctacaaatgccgcaattccaagggcatctcccattccttttaaagaccatgcgaagatcaaaatcgcaactgcagggatcatcagtcggaatccttctacaaaactgtccataaatcctttgaatgtgatcacctttctcggcaaatacaaaagcagcataaacaaaatcgtcaccgatgttgcaaagatcagacttgtctcggcatcgcatccggaaaatgcagtaaagacatcggttgcccctccaagatatcctgtatagatcattgcaccgatcgcagagacgatcaaaaccgctaccggcaggatgagatctattacttttcctttttctgatgtctcttctgcttcaacagtctcaaattcttctgcaccagttgtgaaaagatctcctttttgtgcatttttttcgtgtagcttcatctgaccaaaatcaaaaccactgataatgacaaacagtaccattgccagcgtcaaaattgcatataaattataaggaattgttcttaaaaacaactggaatcctgtaatcccggcatcttccggcacataggagttcaccgctgccgcccagcttgagatgggtgcaatgatacacaccggagctgccgtagaatcgataatatatgccagctttgctctggagaccttatagcggtctgtcaccgggcgcatcaccgaaccgactgtcagacagttgaaataatcatccacaaaaatcagcactcccagtcccgtcgttgcaagaagggcactctttttgctcttgatcttacttcctgcccagtttccatacgcagccgatcctcccgattttgccatcaggacaatgatcattcccaacagaacatcgaatatcagaatattcagattcatactgtctttcatgatctcaaaaaatgacacaaacgaatcccagggcgaaaatcccgtatacagcagcgcccccacagcaacccctacaaacagagaactgtatacttcctttgtgagaaatgcaagcacgattgcaagcagcggcggcacaagagaccaccaagttccgataaacatagaaccatccattttttccttcatcctcttttctattacttttccgcataacaataccctgtcctggcaccagacttcgccttgtcatgacagggtatctcttactattttactggatgatgcataaatatgcaattatatttttttattccatgcaaatgcatgattcatgggaccactgccctgtcccagatccaacataaaatgtagtgcatcggacaggtattgctttgcatttctcaccgattcttccaacgtcaatccttttgcaagattggctgcgatcgcactggaaagtgtacagcctgttccatgcgtattgggattctcaattcgggttccgtaaaaccattgtgtcaccccaccctttttccagagaatgtcatttgcctcctgcctttgatgaccgccctttactaatacgctgcatccaaacctttccccgatgttttctgccgcctgttccatgtcttttgacgtcctgatctccaatccggacagatactctgcttccggaatgtttggcgtgatcagctctgccattccaaacagcttttcctgcatcgcacaaacggtctcttcccgtgtcagtttcgccccgcttgtcgctgccatcaccggatctactacaatgtgtgtcgcccgatagtgccgcagtgcctccgcgatcacttcgatcagctgcacagatgttaccatcccgatcttcacggcatccggacggatgtctgtaaaaacagaatccaactgtgcttttaaaaattccggagagacttccatgatcgcatccactccggtcgtattctgagcagtcagcgctgtaactgcgctcatcgcatagactccatttgtagtcatggtcttgatatcagcctgaatccccgcacctccgctgcagtcactcccggcaattgtcagacctgttttcattttcgccatgtatccgtcccccttgccagcatttccaacaatgcttcgtatcgctccagagactgcagacagatatgtgcagtctctctgactttttcttgctcccggtttgctttttcatacactgcgactgtataaaatccggcttttttggcagtctctatggcatgaagtgcatcttccatgaccagcacttcattcggattgcagtgcatccttctggctgcctccagataaatatccggctgatctttgcccactttcatctcgctgcaaaacaacagctctgtaaaatacttccggatctgcagtctctcacacgccatccgaatacacttcggatctccggaagttgccagaaccataggatatcctttttgctgcaatatttccagcagctctctggcacccggttttaaggtcacttcctccctgtaaaatctttcgatctgacaatggactccttccagaacatctgacacacgaactgagagctgatattgctcaatcaggtatcctgctccctgctccagactcatcggaaacaaccgatctcctaaatccggctccggtgtcactcccagcgtttcaagataacggtctgctgcatgctcccagatttccatggaatcaagcagcgttccgtctgcatcccagatcattccctgtatcatacgatcgcctcgatccgttttttcaattcttctgccgccttcttacggtcatcctgtgcaaaaattgcactgatcactgcgattcctgcaattccactttccgaaagctgctccatattttctgcacagatccctccaatcgccactaccgggatctttaccgcagcacaaatatcacaaagcatggtacgctccacttctactgcatccgctttggaactggtcggaaaaactgcccccactcccagataatccgccccttctttttctgcctgtattgcctgctctacagtctgcgcagatacgccgatgatcttttcctctcctaagatttcccgtactttccacaccggcatatcatcctgaccaacgtgtacaccatctgcatctactttctttgcgatctccacatcgtcgttgaccacaaacggaacctgataagacgcgcacaattctttgatctcctttgcttcctgcaaaaaagctccgttgttcatctctttctcccgcagctgcagaaacgtcaccccgccttttaaagccgcttctacctgctcatacagtgtgtcatgttttacccagcttctgtctgtcacagcatataacagcagggaatccttatcgcacctcatagtctgctctcctttccagctcttctcctgtcagattacataccgcatcaatgatccggctgcgataggtcgcatttccatcttccggacgcatattttcccaggcgatctctcctgctgttcccattacgcagactgccgctgctgccgcatccagtatgtgatccggatttgcacataaaaacgcagtcagcattccggaaagctggcagccggttccggtaatctgtcccatctcttttcttccatttcggatcacatagcaccggtctttatccgcaaccagatcaatagcacctgtcacggctacaacagagccgcaggatgccgcaaatgattttacaaatgtcactgctaaatccagggtttcttccgtaaccatatccgcctcgcaggcatccacacctcttgcaccgcccatacctccggccagtacttttatttccgacatattcccccggatcaccgaaacgtgtacttcctgcatcagatgcaaagccgtctgtgtacgcagagcgctggctcctgctcccaccgggtccagcatcaccggatgtcccagctcatttgcctttttccccgccaggaacatactctcaatgctgcttttatgcagtgttccgatattgatattcaatccctggcaaatcgttgtgatctcctgaacttcctccggctcatctgccatgatcggactggcgccgcatgccaggatcatattcgccacatcgttcaccgtcacataattcgtaatattatgtaccagaggatgattttttcttacagtttccagatattgtttcatgattgactcctttcagacccaaaaaaagcggagtaccaatgtatggtatctccgctgtctcagcatatctatccctacgttggcattatccaaatcaggtcacaggtcgaagcgattcagcttcctctcagcctgcttgatacgcaagctcccttgtttttttatttacatttattatactctgttttcttttcattgcaacacctatttgttcacaatcgaatctggatctgatattttttcatccagtagttgatctgaagcatatatgcgatcatctgaggacccgccatcagctgaccgtaccacggtcttccataatcttttggtgcattcaaaaaccgctccgccttcttcctgtccaaaaatgcccggatcggtgcatttgtatcctgtaagatttcttctctcatccttctggccaaaattgcttcgtactctggattgtatgttttcggatatggacttttctttctccagagtatttcttccggcacttttccttttcccgcacagcgaagcaaatactttggaatcccatctttgcattttatcgtccacggcacattccacacatactcaatgatccggtaatctgcaaacggtacccgcgccgacaagtcataccaggtactggttctctccattcgatccagaagcgttgccataaaccacttcaaattcaaatacgcaatttctctgcgtcgcctctcctctttcgtatcctccggacaatacggcgtttccctcacagacttttcataagcggcatccgcgtactctttcatcggaagtttttggatccactcttcccctagaagactctgccggacagactgatcgaatgcccatggaaatcctgctgtcataaatgcttcttttttatgaaaccatggatatcctccaaaaatttcatccgcacactctcccgtcaaagccacatgactatactgtgacacctgagaacaaaaatacagcatcgaagactctacatctgccatacagggcagacatctcgcatctactgctttataaagatattctgccagcttttcattgctgcattccagataacgatgttcgctgccgcaatatgctgccatcatatcgacccagggccgatcctgacttggctgaaatgcatttgcctgaaaatactgctgattcccctcaaaatcaaaggaaaaagtcagcagtttctcgttctcttcccgcaatgtctccgcacagattgctgtcaccaggctgctgtctataccaccggaaagaaacgaggaaattctttctttgctttccaactgccgtttcatagtatcttcaatcagccatgccgttttttccacggtttccttttccgaatcttcgtgcggacagctcttgacattccaataacagtgatctgttaccacaccctgcgcaaaagaaatataatgccccggaagaacttcacaaatatcacgaaaaactccatttcctggcgtccttgccggccccagtgcaaaaatttcacaaagtccgttttcatcaagtatcggttctacccccggatactgcagcagacttccgatggaagatgcaaaaaacaacgtttctttgtttcttgtataaaacatcggctttgccccgatcctgtcacgaaacaaaaataatgttttctttgtttcatcccagatcaccgccccgaaaacaccgtttactttttccacaaatcccggaccatactggaaatacgcaagcaaaatcaacgcttcactctggtctgtatccgcttttaattctctgcgcagttctttcgcattatatatttctccattgaatacaagtgtacacgtatgtgcctgacgttttaatgtcatcggatgtgcgtgtctggtgtcttccacacaacgccccattgcaaacccgatattctgactgcaaaatcctgtaaatgttcccatggttttccccttttctattgaataatcggttgatactgttttccctctatcgccgcctctgctgccggaatcagaaattccagactggcgatcatggaattgggttttttctgtggattatcctgcttaaacggtacaaaataaacatgtttggcatttaacaaaactcctatatttttcatgttcatccctagcgcatcattggtagaaatcgaaaccagaagcggcctttcattgcgcaaatgtgcttttgcagccatcagtgccggagtatccgtgattccatttgccagttttgcaatactgtttcccgtacacggcatcaagatcaaaagatccagcaggcctttgggaccaatgggttctgcctgtgggattgtcagaaacggggcttttcccgtaatctcttttgcccttgtcacaaactcctctgcatttccaaatcggctgtccagtgtctgtgccgcatctgaaaaaatagtctgtacttctgcgccttccaattttaatgcctgcagcgcctgaaatactttttcatacgtacaaaaagatcccgtgatcgcaactccgaccctttttccttttaatttcatcggttacactcccttttctcgcttttttctatctcttttaaaatctctcttccgaacaatctgcccgatgtctccggagaaaagcgccccggaagacctggcagaaatgttacacaaacgcccagtcttgcggccgcatcccgatcgattcctccgggaaccgaagccagctccagcatacagactttttctgacagttcctgcagcagctcctccgtccagacaagtgacggagctgtattaaaaataaatgctgtatttttcagcatgggaaaaagattctcccgggaacaaatcacagcccctgctttttttgcacgctcacacgcatccgcatccgaatcgtatactacaatttcacatccccagcttttcagacaccggtggatcgcacttccacaccttccatatccggtgaggatacagcgatttccccgcagtgtgaccaaactgcttcggactgcttctgcaatcgcaccttctgccgtggcagctgcattttcttttatgacattttctgagtccatcagatcatacaccattcctccccggtgcaatatctcttgtttcagttctttcgaaaagcatcctccaaatatacgatgtccatgttttatacagttcacgatctgttctgcatccggtttatgctctgtacaggtgttgagcacgcctttgcgaagtacaggcaccggaagcaccacaatacggcagttctcaaacaccttctgcagctgtccggctgtctcctcctgtccgggtccagttggcagatatgcggtttctgtctgccacccctgttcttccaaaaattgtgttacgcagatctgcctttgatctccgccaatgatccctatccttttcaagcacacaaaatcctttttcttttaacatatgcatctgcacgcattgcgtgtctgctgtcagcacaaaaaaaccgtgcatgattctgatttgtcaccattttcatgcacggcttttatttattttatcttaagaaattttcaatcacgactgcttctgcctcttcttcgctgagaccaaatgtctgaagtttgacaagttgttcgtcattgatacgtccaattgctgcttcatgtacaatctgtgcatcgacatgcgttgctgtgatctccggaatcgagctgatctttgcatgatccataatgatcgaatcacactgtacatgcgcatgacacagctgatttccaattgcctttggatggaacacctgaccggatgttccctttgcaacagaacgggatacgattcttgcagaactgttctctccatttaattctacatccatattggaaatcgctttttgatccttgtgagtcatcagcttctctgtcacgtaaagttttgcgccttctgaaagttccacatgtgtctcgcgctctgtaaaatccactcctttgatctgtgttgtttccagtgtaaataccgagttctcccccacataaatttttgtcaccggattgagaactttttttccacttccgtttccctgcgcataatggttttccacatattttacattggcattctttcctacatgaaatgcatggattccatcgtgtcttgtctcgctgcacccctcgccatggattccgcagcctgcaatgatcgtcacatcggctccgtcttccacataaaagtcattataaacgacatcaacaccttcctgagtcataacaaccggaatatgcacctgttctccttttgcctctccactgatatgaatatcaattcccggcttgtcttctttcttcacaatgttaatatgccggctgtctccatggcacactgccatcccgttcagacgcagattataagccccttcctgcttaaatccgtaagaatcgatcacatccagcacctcctgggtcaccttattcagctccataaagttctccccctttctggattctgcatgcacatgcctgttctttttctccaaacaactgagaaatcatctcctgtgcagctccgatggactgcacttttccatctgcgatcaccataatccgatctgccatttcaatgatcctctcctgatgtgagatcagtaccagactctcctttttctccttatggatctgctcaaaccgtttcaccagcattgaaaaactccacagatcaattcctgcctccggttcatcaaaaatgcagatattgtgagacttcgccaatactgtggcgatctcgatccgcttcatctcccctcccgagagtgtggcgtccgcttctctgtcaatatattctctcgcgcaaagtcctacactgcttaaaagatcacagcatgtcgtctcatccaatgtctctcccgctgccaaagacagcagtcttcttacggtcatccccttaaaccttggcggctgctgaaatgcaaatcccatacctgcctttgcacgctcatcaatactcatattcgtaatatctgttccgtctaaaaaaatacttcccgaacttgcccgattgatccccatcaatactttggcaagcgtagattttcctccgccgtttggtcctgtgatcaccagcatctccccgtcttctaccgagaagctcacgtccgagaggatctctgactgtcttccttcttctgctacatcaaaagataaatgttctacctgcagcatctgtctgtcacttccttttcctgtattcaagcttttatccgccttttctctggcagacaaatgcccctttataaactgtaatacccctgtcaggttttgtcaaccgccttgcatcccgtctgccatattcttgttttcctattttacatctcatcaaagtaagggtaaaataaaagaagaaacaggaggaaatgatcaatatggaatctcacaaacatttattatggaaattatttctttccacattttatctgagtgccttcacatttggcggcggctatgtgatcgttacacttatgaagaaaaaatttgtggatcaatatcactggatcgaagaagacgaaatgctggatctgatcgccatcgcccagtctgctccgggaccgatcgccgtcaacggcgccattgttgccggatataaactggccgggatcccgggagttctggtctgcatcgttgccactgtccttccgccttttcttattatttctgttgtctctgtctgttatactgcttttcagaacaatgtctggatccgtctgcttctggaaggaatgcagtccggtgttgcagctgtgatcgcatctgttgtatacgacatgggacgcgggatcgtaagcagcaagcatcctggctctgtcatcctcatgctctgtgcatttgtggcaaatgccatactgaagatcaatgccgtcttcatcatcttgctgtgcatcgcacttggactctttcagacctggcacgaaaaaaggaggaactctctatgatctgtctgcagctttttttcagttttcttcaaattggagcgttcagctttggaggtggttatgcagcacttcccctgatccagaatcaggtagtcacgctgcatcattggatgagtatgtccgaattcacagatctgatcaccatctcccagatgactccgggacccattgccattaattccgcaacttttgtaggaatcaaagtcgcaggaattccgggcgcagtaaccgcaacccttggctgtattctgccttcctgcctcattgtaacggccattgcctgtatgtatatgaaatacaaaaatctagatacactgcagagaattctttgtatgctgcgccctgccgttgttgcactgatcgcttctgccggactttcgattctgatcacggctttctggggcaatcgcaacatccacttttccacctttcagccaaaagcagtactccttttcatcggctgtctgtttcttctccgaaaaaagagaaatcccatcctggtgatgcttttagccggagttgtcaatctgggaattgcactgcttttttagccaagagctgacagatatctgccgtcaaagcttctttgcgattgtatcaatcttgcttttttcagcagttttgtatatgatagtgacaaagcaatctctcaatatgacttttcagatttatttttacaaaggagatatgtatgagcaaccgacattatctggtcaattcagaagatcttcaaaatctaaatgcacgattactttccatcgccttctccaaagacgaaggagactggaaaagcattatgcatacacaccattttacagaactgttgtttgtagtcaacggagaaggcagtttttccttcaatcagatacaatccccgctttgtcccggagatttggttatcattcccccttacaccgaacataccgagcgttcttcgaaaaatcatccgctcgaatactatgtacttgggattgacggtatttcttttctttcgcaaaaagacagagagtgtgctcaggtattctgcaattttcaacatgatcccagcattcatgaactgtttcgacagatgctctacgagatccgcactgcacagtatggatctcagacaatctgccagcacctgcttgaaatcctgattctcaaaatcatccgttcccagcagctgattccggtatccatcaattccatccggatgaccaaagaatgtgcgcagatcaaagaatatctggattccaactattcagaacacatcacactggatacattgacgtctctgacacacatgaacaaatattacatggtacactcttttacaaaatataccggactttctcccatccagtatttaaaccagacccgcttaaagcgtgcacaacatttattgagaacgaccaactactcaatttctgatattgcatcgtctactggattttcttcacagtcttatttcactcagattttccggaaaaatttcaatatgactcctgtaaaataccggcaggagcatgcagaaagttaaattctatgccatttgctgcataaaaaaggaacgctttcccatgaaagcattccttttttgtttactctttatttcttaaatctcataccatttgatctcattcgcatccatgtcaagatcaaaactgcttccgtctccacggtataccgttgtactctgcggctcatatgtattattgaccacacagtactttccattcttcacataggcatgcacttctacattgtagtttgtgctgaaccatttgtgcagatgatcttcatcatgagaagaccagatgattgagcgatacaacagtctgctgttttcaaagctgtatggaagtccgctgatataaacacagcgtccttttccgaactcattcactgcaagctgtacctctttttctctctgtttgatgatcgtcgttccatccagtgcaaagatactcttcttaccttccccaaaatcaatctcatccttgcagtcctcgatgataaagtgatcatgctcctcccagttatatttgtccatattcagtgtaaatccagtctctttctctacacccatcatggttgcaagctggaagaaatgtccttcatactgatgtgctgccggctctcctactccgatgaatccaccgccattgtaaacaaatctcttaattgctgtcacaatcttctcgtctgtccagttctctccacctgtataagctgtgtccgcatctccgatattcaaaatcacatccacatcatccagaatgtccggattttctcgaatatcatcaaagtttataaacttcacatcaaacggagctccgctgagcgcttcgatcacacctgcataagagtaattctgtttgtagtagatggcatgatgaaccatatgatttccccatgcacgcatcttgccccagcagtttaacactgcaactttcttgatgcaatatggtgttgttcctttgatgtttgtatacaatgtgcggaattcattgcagacgctttctacataatcaataaattccgggaattccatagccagtttcaaatatccgccgtatccgatacgatcgatcggctttctcaggattgcacgtcttgcagtcacccagttgacttttgcttctttcaccggatctccgccttcgtggaatgtgtccgggaagaaatatggcaaaaatcttccttctgtgtattttacaccttcaatatcactgatcagacgcaatgtagcaccatttccaacgctgcctaccactgcatccagaccaatggtcttaaactcatccataaacggttccataccaatccagtgatcccccaggaacatcatggcttcttttccacattcgtgtgtaatatccaccatctctttggcaagcttggcaacctctcttctctggaacgcctgaaaatctttgaattctttggatgggatgcgatatgtattgttcatatatccctgatcgatgataaattccggacggaactgatatccgacttcctgctcaaactgctccagaatatatggacttacagatgcagaatatccataccagtctacataacgctctcttgccagttcatcaaaaatcagtgtaaactgatggaaaaatgtagtatagcgaatcacatcaatgtgtggattgtcctgaatatactttctcaaacgttccatggaatatttgtgagtcttcggctgacgcacatcaaatgtgatctgtttttcaaaatctgtccatccattggtcacggcgttatacatatgaaccggatcccacatgatataggcaaggaaacttacggtataatcatgaaatgcctttgcgctgtgaatcgttacatcaccgcttttgctgtcatagctccactgatctgtcggtacaacctctgctgttgtacgatcgatcacttcccaccatcttgtaatatcatcatgatcattgactttcagcatatccggatacagatgattcattaaatggatggataatgtatcttctactgctgtataaaaaggagtcataatatacatctgctgaatctcatccggatttgcctttgcccattcgttgtcttttcttgttgtatagtaagtggaatatacctttgcatctacattttttaattcttccgggtagtccgttccatcacaatcacggatcgcatctgccccccaacgttttaccaaatccagggtttcctgcacaacgtctacatctgtagggatcgtaacccttccgctcgtacactctttcaccatgattctcctctctcttctctattatagtctactttgtataaatcaaggataaaagaaaaccctactttcgtcaattttcttcttgctttcatttttagtattcttgctgttgtagtttttacaatttcaaaataataattttattctatttgtgcatcctcacgtcccaaagagattacaatctttgtcccttgtcctactcttgattctgcacggatactatgccccaatcgctgtatgatcgttttacacaaatacaggccgattcccgtggatttctgatgttctcttccattatatccggtaaatccacgctcaaaaatacgcggaaggtcttccggtgcaattccaatcccgttatcttcgatcaccagatcctgctctttcatatagatggaaatctttcccgtgatgcttgccttttgcgagcggacttcgtctgacgtatcggtatattttaaagcgttggacaggacttgttcgatcacgaacagcagccatttttcatctgtcaacaccatttgtctgctgtcctgaaagtccagatgaatttttttcaaaataaaaatctgagaatatttacgaatcgccttccgcagaatatctccgatcggataccattgaaatttcagatcagtccccatatcttccatccgaagataggaaagcaccattccgacatattcttccgtctgaaagatcttcattttcatttcgttcaaaaactccagtgtctcttccccattgtcttcaaactccaatgctttttcttcaaaagactgcatgagaagatgcatcgcagaaatgggagttttgatctgatgtacccacagactgtagtaatcggatgcatccttcctgctaaggagcacttcattttccaacatctcccgccatgcaaaaatcgtctctgtgatctcctgatactctgcttcgatcctgtctttcgcctctggaaattccttcagctcatgcggcaatgccgctgccagatccaacagcttttgataacgcttccaataaaaataaaaatccagcatgcccaaaaataagagccctgctgccgaaagctctgcgccatacaaaatcacatcaagaggaatcccttttagccagaacaacatacagaaaatcgcaagcatcatcccatacatgccaaccagcaaaagtttttcttttatataagaaatcaacaatctcattctatcacgtacccgatccctttctttgtcgtgatcagatcacagattccgatattctccagtttttttcggagtctggtcatattcacagtcaatgtgttatcatcaataaactcatcgctctcccatagacgctctatgatccgatcacgctttacaatctttcctgcattctccatcagaatctgcagaattttgaaatcatttttcgtcaattccagccgtttcccacaaaaggtgactgacgcatcattgagatttaagatcacatcccgatattccagcacattgagctgccctgcgaaagaatacgctctccttaacaatgcctggatttttgccgtcaggacattcagatcaaacggtttttccacaaagtcatcccctcccatattcatcgccatcacaatattcatattatcatttgctgaagataaaaacagaatcggtacactggaaatctgtcggatctgagtacaccagtgaaatccattatagaacggcaaaataatgtccatgatcacaagctgcggatcaaatgccgcatattcctgctgcacccgcttaaaatcctgtacacatgccacttcataatcccacttttccagatgttctttcattttatctgcaatgacacgatcatcttctacaatcagtattttatacatttccttcccctttcaagcacttcttataaaaataatagctttgcttcttacggctgtcaatgtcaatcaaaaggacctttagaaagtctttagaattcttaagtatatatatattgaccccatatattatattttctataatatactcacaagatagatatacggtttacatacctatcaaatatacgaaaggaagggattgcttttatgacattcacactcaacacaccgatgtttgactttcttgttctttccatcattgcagagggagatgcctatggatatcagatcagtcagatcattaaacgagtgtctgatacaaaggattctgccctgtatccgatcttgaagaaattacaggaaagcggttatgtagaaacttatgaccaacagttccagggacggaaccgcaaatattataagatcacacaaagcggaaagatccggcaggcgcacttgaaaaaggaatggaaagaatacattacgatcattgatgatattgtaaatggaggaatgggaaatgactaagaaagagtatatgaaaaaacttgcctaccagcttcgtcggcttccaaaagaagatttcgataaagcaatggattactttgaagaatattttgaagacgcaggcatcggaaacgaacaaaaagccattgaagatctcggcgctccagaagaagcagcttctgcactgatcctggatctggcacaggaaaatgctgccaaaccgccaaaaacaatgaaacgtcgcttttccgctttatggattgccatccttgcactttttgcagcaccgattgcactgcctctggcactttgtatcctggctgtgatcgcatccctgatccttggaatacttgcagtcgttggaggtatcttagtcactgcacttgccgcagtggcaggaagcgtgcttggcatcatcggaggaattgcgatcatccctcagacttttgggggaggactggttacgatcggtctgtctctgatgctgatcggttgtggaatcctggtcacatatttcaccatattactggctcgctggatcatcatcaaacttgccggactgctcggcaaacttgtgagaaaagggggaaaaagacatgaagaaaagtaaaaaaatcattctgacactttctgcagtcacactgactgccggtgttcttttcaccggaatcggatatatgaatggcggtcggtttggattcgtcttctccgacggcaaatttatctctgctgacagtatggaaaaagaaaaacggccatttatcatggagaaaaagaaactggactctgtaaaaaatatcgatatcaagattttatcttatgcaaacatccagattcttccatcttcagacaacgcattttatctggaatacaatctgccaggagaatacccaaaacctgtgttctcatgtacagacggcacactcacactgactcaggaagatcgggaaccgatcgccattgtcggatttggatttcatgcatcccagaattctgaatgcagcgtcacactgtatgttccgaaaaaagcagaattgaacagctgcagtctctatagtgactccggaaacattcaggcatccgatctgaccgcctctgattttggtctcggatgtgattacggagatgtcactttgaaaaatatcaaaggaaaagaacaacttcgtctcaatttaggttccggaaatttaaacgctgataccctttctggaaaaacggccgcagtttacaatgacagcgggaatatttctttaaaatccggcacatttgacgacctgcatctggagaacgactacggagatgtccgtctggacggcactgctgtgaaaaatgcctctgatctgactttggattccggtcatataaccgtcgccgacagtacacttggcgctgcgcggatttataatgaaagcggaaatatcacactgaacaagacgaatggaacgtccatggaagtcactgctgaatacggagatgtctcctttacagatacggaggtttctgatgttggcacattcacattggattccggcaatttctctgcaaatacaagtaccgtcaaagcgatcacggttaaaaatgacagcggcaatgttttgctgaatcaattttccagtgaaagcgcagtttttacattgtcctacggagatctggatctgactgccacaaaacttggctcctttgactgtaagagtgaaaatggaaatgtttccatccaacttccggatccatttgattcctacggattcaatctccacacagaatatggggaaatcgctctgccttctgcaaaagaaactgctcttatctctgaagaagaggattcctccgaagtttcctaccgtacaaattcagaggcaaaacataaaatccaggtagaatgtgaaaacggaaatattcggattggttagaagatctttccagacaaatggatatatttcttaaataaattgcattgagggtgtgccaaaaagcacacccccagctttattgaatttgttctctaaactcatgaactacctgcataaattcttttacacgatttacatctacacgattttcaaattttccatctttcttgaaagttgttccaacaacagctgcatccgcagttgtaagttttctctcaatcgtattaatgcgacatcctgtattacataaaacaacaatatctggattcgcctctttcacacttgcaatcaaagcatcatctacatcctgtcctgcagcatctgccgaaatacataatccatctggcgcagcctttgctattgtagttttggcaatatctgcaagtggtctggtatctaagctttgatctgattccgggttaataaagtataacatcttcagttcatccaaagggagcgccgcttttcttctcagcaaagcactaaaatcattgttataaaaaccaccatctcctacataaacaccacaaaatgttccacgtacaaagtttgcttttaccgccgccgccaattccaaacatgcccttccatcactgattgcatctactccatatggtacttttatttctgatctcagatttccaatgacatatgccatggctgccggcgtaaccatatccattgttctctgatatgggaaactaaattcattgctaaaaataattccatccacaccgccctcctgtaatgcatgtaaatcagctcttgcatgttcaatgatcacatccatatcattttcttttttgtacaacggatctcccgggagtggatcaagatgcagcatcgcaataatcggttttttcactccaaacaatttttcagtccataacattttcttttccctccaactaaacaacttattattttttaatacatttttatacttttattatatcactggtatgctatatgtcaatgttttatttttaaaaaccacataatacaaaacatccaattaaaaagggtaaggttcacttctcttatcaagcactaaccttacccacttattttagtattcaaattgtcgataatatctgcgaatagaaagaggatgtcttaagaataattccatatatgcatctactcgattatttacaccgtgcatcactaaatgcgaaatgcttcctcgaaactctggactgattccttttaactcctgctctttcgtatcaatgatcgtataatttgcattcacttttggtaaaaatcttgcaactctttccgccaatgggcgctgctcatcttcacccatgaataaagtaaccggtgtatcatctacaataatttcctgcataccatgaaaaaattcctgacaactaattgattttgtccggatccacatctgttcttcccaataacacatcgcataagaataggtagcaccatattgatttcctgatccgataaagtaatgtggaagatctggatgttttttccaaaaatccactttattttttgcatactcatatgcccattcatccgaatccttttctacctgaaccaacgcttccgccagataggattccatttctttattgtaacgatcatattcttcaaattcgccattcttatacataagatagtttgcaaccatgtaaaatttcaattgttcattcatcggatatacaattaaatgctctctcttgtctggctgcgttaaaattgtacccggtgtatctataaacgcaaacacgcgcgcgccaatctcatgaacgcgatccactaactcgaccatctcttttgtgtttccggacacagaagagtaaataacaaccgatttatccgtaaatcttttgtttccggttgttagaaactccgctgcattttccacatacaccggtaatttagatctcccccgcatgtatacttctacctgcatactggaagcatatgttccaccaatccctataaaatatatcccatcaaatccttcttcccaaatttgatcgattacgttttcaatttgtgagcgcaatgcaagtgctccattcacactctcaatttgagcctgttcattaaaattgcgtaaacaggcacctgccgattctttccatgcttttgcttcgtatttcatgctgttccctccatattgtcttttcatcgcaaacattgttctgccaatcaccatgccccaaaatatcctaatgtctcggtggcatttccagcacctaattccatagatttttcaatggaaagtccatctgcaattcccgttaaaaatcctgcaatgtaactgtcacctgcgcccaaactatccactagatttgcacatggcacaattccaaacttatgaaatacttctccgtcaaaacataaactgccttcttctcccatcatgcagatcacaagttccggaccggaatcatacagtgatttcatcttctttctcacttcatcggtatctccacaatcaacagagaaaaacagataattggtatacggaattgccactttagactctgcagaatccgggtcagtcgcacaatcaaacgctgttatgattcctttctcctgtaattcgcgaaactgttttccgacttttccccaaatatcacaaactacgacatcgaatgactttatgtattccatatccgcttctgtcaaaacataatctgccaaaacaccttcatcgtaatctccaaaaatgcgctcaccatttttaatttcgacctgagaaacggctgtttttccttctgcaactcgtaaatgcgaaatgtccacgcctttgcctgcgattgcatgcagcatcgtctgaccatagtcatcatttccaaccggcccaatatacgctgctgttccgccaagtctcaccgtgtaaacagccatatttaccggacctcctccggcaaaagctttccctccctctaaattcttataataatcgatacaattacttccaacggctgctaatctcatactttcatcctttctggacttaaagaagggatgtttgcactgtgaaaaaggatccttcctcccttttcacagtacattcccatatcctctttctttatttgattgaatcgataaatcgttctacttcttctctgttcggatatccacaccctggcttctttgtcatacttccaggacgtgtcactttataagctgcatacttgctggcccattctgtagattcgcgcaggctttttccccacacaagatttgcagctacggcagcaagatatccatctcctgccccaatggtatccactgctttcaccggcgtcgcttctacttcccagtattcatccccatcaatgatcgcacttcctttggaactacacgtcattatgacgcctttacaatggtatttttgctgtagtgttctcacaatttcatagttttcctgatcagaatcttctggaagattacacaacatttttgcttcaacatcattcaataccatataatccaggtaatccaattctcccatctcttcacttggcaatggactcacgttacataaagttgtcattccgtactcttgttttgctattttcgcaccgtccaatgcttttcggaaaggcatgccaaatcctgtaataaatacttttgcttctttcatcgcctcaatcgcatttttggtttcttctaaagtcaacgcctgacatgcactgtctccatcaatgatcgtatttgtgctatcctcttcaatcaaaatcagtcccgttcctgttgacactgaatgatctctatacatgtatgtggtgtcaacacccgattcactcatccactggtctcccatatctccccatggatcatatcctacttttccaatatatcccgtggatacacccaaacgtccgagtgcaactgaaacagtagctccttttcctccatcttcttctacatgccaatttgttgcttccagcgtctccccccgacgcggaaatcgtttgatatgacaaacttgtccaactccatgactatttaatacaattacatcaattggtcccatttttcccatttttatcacctctaattttcatccaacaattcacggatcacttgataccctctttcagcagcataatccggctcatttgcatagcgactaaacaactccaaagaaagataaccgtcatagcctacttctttaagatatctcacaattcttgggaaatccatctctccatcaccaggaatcaaatgatcttcacttgttttttcacaatcaacaaaatgaatatgcttacaatcctctcccattttttcaaaatatgagcaaacaggctctccataagtaaatggtgcagcaagatctaacatacatttaaagtttggcgaattcacctgatccaacgcccacttcacatcatccgatgaaacaataatggttccctcatacggtgtaaccggctccagaataattgtctgaccgattttttctgcatgctctgccaaaatctgcatattttcaataaaaagttttttcacatcttctttatttcttccatagccaggatgattgcaggctaacatacaatatttcgcatcaatctctcttgccatatccaatgacaatttaaaatattccaaactttctttgttcatttctggattttcaaatactaagctatatggagagccggtattttctggaacataatcaataatcggcatattataatctcttgataattgcttgattctttctgctcctcctcttgccagatccggtgcatacgcatgtggtctaaatccacccagttcaattccgtcatagccatactttgctgccgcctgaaatgctctttctaatgggtaatttgaatatcctcctgtaaacaatgcaattttcatagccatttttttcctccttttctactttttcccgagaatttcttctatatgctgcttcaccatctttgtttcttctatatcgagataaccaaaatcaaacctcaactcttcatgttcccctggtttgatcgtattatataaatgattctctttctgatattttgttgatcggttcgtaccagttgtaggcaatgcaattccaatgccatcttcatccccggtcctgcacagccatctcaatgcatacggaagtttttctgttttaaaacgcacatagcaggaatctccctccggcatcacctgcattgcatgcgcccagccctcctcatcggattcatacttaatgttaatacacatttccggatcattgcactgggattctgaatctaacacatctgcaatcattggatcgtcgagaatccgttttgcatactcacgcatttttatcgctctttctgaatctccctctaaaatgggtggatccggtttgatgtgctccttatccttgatagcactatagacaatatgagagccttctaccgccagccagttcatatgacacataaacatataatccaatggactttttctgcgattatggatatctatatgcatttctgccacagtactattttcataaagacgtaattgaggactatatgaataatgatattcctggctgtttcgatatacatatgttccacccacaactaaatattttcctttttcatctcgcccaatcccaacataagtatccggataataagcaaacggcaattctccatgaagtggataatcctctccctcatctgcacaattgatgttggtcaatccacaatgtatcaacaaaccaccatagttatccccaaattttgttgtattttggggctgatcaaaaatagatttttgcgttaaatttttcccatgaaattcagcaaaccaaatctgttgtcccatataaggcaaaacaaccatattacagtttttatttctgatttttaatccgcatacacccgtttcgtaacgaaatgctactgcgctgaattcaccatctgacaacaattctattggtctgtctgaaaaaaaagaaggtttgaagttaatttttgtcaactccatatgtatgctcctttctacaaaacatcatacccatattctttcgcaagatcatccaactgcgttttcaacgtttccggaacaaagtcttgatcttttggcatgcgtgaatgcattccaaccggacctccgccatatttcatcgcataaatccatgctgcattgaacggggcctgtttacagagatttcgaatacgaagaactttatgctgcgcttccatacattttttataatcgcctgctaaacctgcatctacaatatctttcatttcttttgggaaaggaactgccataaatgaaacacatccaacagcgccaagctgcatcataacaccatctaatccatcacagcctcccagaaaatcaaattcatccggattgatgcgcagtgtacactgaataaaattcaaaatatctaccgatgcatctttaaatcctcttaagtttggatgttcgtttacaagccgacataatgtgtctggtgcaaacagtgttcccatctgtacacagttgtaaatataaacaggacgttttgcataatcaatcagttccgcagcataatcatataaagcatcctgggtatgtttaaaataaggcggagcagtaatacaataacaatctgccatacccgtttcttcatataaatccagtaattctttatttaactcaacagaattttcaaatgcacaggccatgatcttcgcttttccctgtgtcacaccataaattgttttcaacaatttcattttttcttctactctaagtgcctgacattctgctgctaaaccattgataaagaagttctcaataccttgcgtcatctgccattcaatcaactcttctacctgtttgtagtcgattgaaccgtcctctctaaaaggtgttaaaatttctgtaagtactcctgtaataaaatgtcccatttttattctcctttcaaatttgatattttatttctttgcttttagccaagtgtcattccgccatccaccaggaagtttgccccatttacataagaagcttcctctgatgccaggaatataactacatttgcaagttcctctggtgccgcaacccgccgcattggtccaattgtcacattgtccgaactattttcaattccaacatccttgtaactgtcaacaaccgtcttcatcatattggtatccacccatcccggtgaaactgcattgattctgacaccattaaatccattttcatttgcagcatttttcgtcatataaataaccgctgccttgcttgaaccataaccgatttcatatggataaccaaacattcctgatacagatccaaaattgataattgcaccacttttttgttcctgcatgatcggaagtatattttgcatcatcagaaaagtcccaaacacattcacttcgtatactttttttacatcttcaaaagaataatcttctgttcttgcactcggacctggtattccagccgtattcaccagcacatcgactctgttaaaacgtgttctgatctttgatactgcttcttttacatcctcttcttttgaaacatctacccccaggcacatactgttttcttctgtaagatgcagcaaatctgctgttctttttgcaaattcttctttcacatccaacaatactgcttttgctcccaaatccacaaatttactgacaatcgctgtgccgattcctccgcctgcacctgtcactgccacaacttttccttcaaatgtcattttcctgcacctccattattgaattctattgaaattggatcggaaaaggaaagtctccccgataataggtttcttttatcaatgcatcttttaatcctgtttgaaagtctttgaatccaaccagacttccttctacaagcaattctcctggatctaacaatacacaggcacatgcgactcctttccctatcttgtatccaagatcataaattttatccttcgcctcttgatcacctctcgaatattgcttcactgcctttctgatttcatcattctgcagcaattcattgagctgatcgcctgattcacagatatgtgctgccgataaaaattcaccgaacctggcattcctgcattccaatgtttttccatctattaccaaaagagcctctgcacaatctgttattttaatctctaatgttattttctgtccaaaaccatttttcaaagatgtttccgtgcactcctttccacgtaatgcaactgctgccgctcctaaaaatgctccggaataccccaatttcgtagactcaatttccacctttctttctggtaaaattctttgaaattctttgagcaaagactccttatattgttcaaacatcaaagaaatcccgccgcctatgatcaccttttggaaatcagcaaatgtacatgcattggcaataactcttcccaaatacattccttctcgtcgtatcgcttttaacgcaatttcatcattttttcttgcatattctgctattgtcttcccacccagtggttcttctgattccagtttcccgccaaattccagataattccttgaaagtcctcttcctgaagcatacatttccacaattccatttacacttccggtatcagattctcttccgttttcttccactacaaataatccgatctcacctgcatgccccagacttccgtaataaagatttccttctatatatagtgcacctccaattcctgtactcactgttaaatacagaaaatcatctttatcctgcgcacttccaaagtacttttctgcaagcgcacatgcattgcagtcattatccgcgtaaaaaggaatccctgtgttttcccggaacacatcacatattggaaattcatgcacatctaaaaaatcagagtcctcccacacaccggttacaggatctgcaaatccagggatcgtaactccacctactgccactctttcaaataaatctggcatttttctgcgaagcatttctaatgaatccatcatctgatggatgatcgatttttcatccatggaaatccactctattctttcttgatacaggacattcccctcaaaatcaacaaaacctatcatgtatttcgatccgcctatatcaattgccaaaactaacgaatcttcataatttttctctattttcattttcatcctcatatgcagggctcatcgcatcatccagtgaagcaactaacggaatactcaaatcaattcccatctcatctgcaatcaaaaacgacaacacctggaatgggatcaaatactccattgtattgatcaactccagatccgaactatgtatccgtaacgaatctgcctgagccaactccttcgtactttgaatgataattctatgtttacaatatggctcgattgcttcagccagtgcttccattctatttctttcattccctgtttctgctgctacaaaaaataccatgtcatctttgtgcagggcacgaaaaggtccatgaagtgattcttccaattccaatgcatacgttggctttccatgacattctaaaaatttcagccctgcttcctgtactgttccataatttgccccatatccaatcaggaaatattttcctgcacccataacacgacttttgttttcccaaaaccaattacacgtatcctgaatcgatttcttcacattgacactcaaatgtttacatccttccagatacatctgatatgtttcttccgttatcttccccgtctgatacgccgcttccaggaaattgagaaagatcaaaagaatccccatcgtttgtccctttgtcgccgccattgcctgctcatgctgccctggttttgtaagtacaatatcggaatatcctgccagaatcccgtttggatttaaagttgttgacatcactttaattccagcttcttttgcacgacgcgctgcatcaacctgccctttggaccgaccggactcggccggacaaaccagaaggatttcatcattcgcatactgctttgcacggttaaacacacaatgattgtgaaacacacccgctggaatcgcagttgcgtctgctcccataagtttttctgccgcaaaacttaatgtgtatcccgcataatagggggatccatttcctacaaaataaattttcttaaactgctgttctttgcagagttccacaaacttttttgtaatttctttcctgttttcaaatatttcttgaagcagttctccctgttccataatctcatccatcatcgcagtacgcaaactcatacttcccctcctaacaacatctggaaataaatgcttctacttcttccaatggtcgataagccggtattgtcccatcgatcgtaacggataatgctgcatacttacttgcccattccattgcttcttttaattcttttccccaaacgagatttgcaatcactgcagccataaatccatcgcctgcacccgctgtattcacaacattctctactttcacagatgctacttccatgtattcatccttgcaaagagccgcgcttccgtctcctcccaaagtcataattacattttgaaccccatacttttcacgcactttattcattaactcttttggatctttttcatcatcatcctgacaaatgtattttgcttctacttcattgataaataagtaatccacataatccagccttcccatgtcttcttccggaagcggacttggattcagtgctgtgatcattccgagttcctttgcatgttttgcaccagaaagagcgatcttcataggcacttcaaaccctgtaacaaaatactgcgatcccttcatttcatcaagtgcctgaataacctcctcctctttcaacgctacactggaactgtcgccatcaatgatggcattttggccatctggtcctaataaaatcagtcctgtccctgtagaaacttcatctgttctatacataaaagtatgatctactcctgcatcctccagccatttctctcccagatctccccacggatcgtttcctactttcccaatataggctgtttttaatcccaatcggcctaatgccacagccacatttgttccttttcctccatcctctgccacatgccatttttttacacttaacgtttctccccatttcggcatatgatctgtataggcatattgaccaacaccatgactatttaatacaattacatcttttttttccatcttcattaccatcctttcgtttcgtgcgccattgggtgatcaattgtttcttctgttgtacacagaatcacttctggaacatatttaggaaataaggtaaccggatactccagagttggttcgctaaacagaataattctgcatacggtctgtttccaagggccagttccaaccatataaacacatcttttcgctgacagcataactttaaatccaagtgtaatcgctttgggtgggatcctgtccagacaacatccaaaagaacggtgtgccattgcaaccatagagtcatcatttaactcaacaatcctggtctttccctgtgcatattcatctacagttaatcgatagcagtaatttctgggtgcttcgttaaatgcaaccaaacctgttgctccaactcctgcccatactgtatcaacaccacccagctcctcacacaaattatctgcataatcaatattgtcgattctcggccagattctctgttcctttggcacgtttaattcttcatcaatgcggccataaaagcatgcattcattgttccttccagactttcatatgtatctgcaaccggtaatgggcggccttcccaatccaaaaattcatccatatggaaaatccacagattcttcaggctgattctttcttcatttacacgtctcacaaaaatatcatattcatctgttggccctgccggcaatacccacttcgtaggaatccctttctgattatgttcaatcacctcatctgccatcatattgccaagtttctccatcaaggctcccttatcttcataaacattcagctttactttcaagccttctttacaagccaattcttccttcggaattgaacaccatttaaaaatttcttcttttgataatctatatgtttccatttctgccctccaaaatctatgtgtaaaaaatactccctaatcattctaaaaaacagattagggagtaacgtgtactcctttttatagcaggaatacaaatcattatttaattctttgcttctccccttgctgcctcttccattgctctttctaaggcatcatgttcagctttcttttctgcgattaaatctgcattcaccttcttgaaatagaagtagaatggaactgctgttccaattgccaatactgctgcaattgtactgaataatggagtgtcaataaatgttgttactacaagaataactgttggaacaattgcgagaactgccataaatgctccacctggcatcctccatgtcggatggtagttactcttctttctaaccttaaaccatgtacagaaacataatacatttcggatcagacaaattagtgtaaagtatcccaacaaagtctgaagtgttgttgcaaatactaaaacaattgcaaatccgctctgccataacatagaaacataaggtgttttccatacaggatgtactttaccccaagatttccaccagtatccttctgttgcacatttgtattcaacacgtgcctggaacatgatcagggatgaaagtgaacctgttacaactacaattgccaaaactgccgctattgttcctgaagcttttccgataaatggaaccgcttcaaatgctgtagcaactggtgcacccgatgctgcaagagttgaaacatcacagaggcctacacatgctgttgacagacctgtataaagcaatgtaaccaaaagcacagttccgatcagagcaatcggaatattcttgtgtggatttttaatctctccagccattgttccacatgtctgcataccatcataagaccatgttgtagctgcaattcccaataacagtgacataacccccggtgataccccttctactgccggtgcactgtagttcgaacctgttacgcagaacagaccaactactacaagaagaataaatggaacaattttaactgctgtaatgatattctggaattttgcacctgcatccattcgaatcatatgcaatgcagtaaagacaataatcattccgattgcaactgcccgtaccattcccggctcccaaccagtaaagtatgcaaggtagtttcctacagtaagtgctgtaatcgcaatacctaccgggtctgttgcccagaagcaggaccatccgccaaagaatgacaggaaattccatccggcttcccggaaatacacaatgaataaaccgtcctcaggatatgctgtcatcaactctgtatagcataaattctgtgggatcataatcaagccaccaatcaaaaatgccaaaatggtcatcgcagccgttcctgctgttcccgctacacctcctacagaagtaaagattcctgatcctacagttgttcctacaccaagtacgatggctgacattaaccccaagcgtctcgttagctctttttctcctccatgtacttgaattggtgtttttggactctcctttgccatattctctctcctttctcttaaactgataagtttttcttatctcttgttattttgtattataatttctctacttgtatatttcaataccatttctgaaacttacatcttttctacattttttacaattttttaatatattttttgtatatatttaatttattttagatttacaacctgttttttcgtataccccccataaaatcaactttatttgtttgttttttaaggcttttttatacttatttccatatatttccataaaattttatattttcattcattttttcaataatttcacgttaaagcccattttaaagcaacatatcattgttattttaaaacatatatggtatactattttcacatcttatatagtatttatagaaaggggatcactttattatggaatcttatttcatgggtattgataccggaacaaactcaagcaaaggggtgctaatcaattctcacggagaaatcattgcagaatacgcgaccgaacatgcaatgacaaatcccgctcccggccactatgaacacgatgcagacaaagactggtggggagatttttgcatcatcagtaatgcgttgatcaaaaatgcgaatatttcaccttctgatatcaaagccgtgggagcaagcgcccttggtgcagactgtctccctgtcgatgaacaatgccgtccacttcgcaaagcaatcttatatggaattgatgcacgtgcaaccgatgaaatggaacagctcacacaaatgtatggtgaagaacagattcgaaactggtatggtcgtccgctctgttccagcgatgtaatgccaaagatactctggattaaaaacaaagaacctgaagtctatgaaaaagcacataagtttttaacaggttccagctttatcactgcaaaacttaccggaaactacgttgtagatcgttttcttggtcttgcaagtttcaacccgctatattttaatgacggaacaccaaatccggaaacatgcaaaccaatttgcagacctgatcaattagctgaagtaaaagaagcaaatgacattgccggatatgtaacggaaaaagcttcgcaggaaacaggacttgccgttggaacacctgttatcgtcggaacagatgactcgggagcggaagcaatcagcaccggtgttgttgcacctggtaaaatgatgatccaattcggttcttctatctatatgattctcggaacaaaggaattggtagatgatgaacgcctgtggcgtgaagaatttatcgttcccgggctttgtgatatttctgcaggcacaaacgctgctggctctcttacaaaatggtatcgggatcatattttttcagactgtgtgaaactcgaatctgaaaatggtatcgatgcatatcagacaatgatggatggagtggccgatattccaatcggaagtgacggacttatcacattgccatattttgcaggtgagcgaacaccgatcaacgatccacttgcaaaaggcattctcttcggattatcactctcccatactcgtcagcatatgtatagaagcgcattagaatctgttgcatattctgtaaatcagcagttaaatatcatgctaagtcatgatgttccgatcgatcagatttttgctgttggaggcggagtaaaaaatgagctttggatgcagatcgttgcggatgtcacaggaaaagagatcagcacaccaaaaatcactgtcggtgcaagctttggcgatgcattaatggctgcttccggaatccaatatccgggatttgagtcattcgataaattaactgactttatcaaacccggaaagacttattatcctgacatggatcaccatgaagcttataaaaagtaccagagcatttatgatgctttatatccagcaaccgtagatttgatgcacagactctcagaataaatacattcatctctggaaggatacataacagaccgtgtaaaaagaatcaatcaagccataacaaaggggctgtcgcactaaataattagtgcgcagcctcttttctatgcaaaaaattacagccaggcttcgaaaagcctggctgttggtgtaaaatataagtatgcaaacccctatattattacacaagaattatactttgaatgaggaaggatatcaactaaaacttcctttaaacttagaaacaattattccagtagatgattctgtgcggttgctgagtcagtttgtggaggctatggatttaacggacttatattctacttatgaaagaataaatacagtatcgccaagaacactcttgaagattgttttatattcctatatgaatggtgattattcctctcgctctatggaattgaactgtaagcgagatattaatttcatgtatcttttagagggaaaaccagttcctgaccatgccacttttgcccgtttccgaagtattcattttgctccgtgtgcgaaacgaattctcgctgaaatgtctaatctcctttacggacttggagaaatttcgggagaaacgatttttatagacggtacaaaaatcgaagcctgcgccaataaatatacatttgtatggaaaaagacggtaaccaaaaatcaggcgaagttgctgattaaaatcgccgatctcattgcagaatgtgagcaactttatggtattcggattgttcacggtgatactgttaaaatgaaacacgtaaaacggttacgcaaaaagctgtacgcattaaaacaagaagaaaacattgtatttgtacatggtattgggaaacgaaaaactcagctgcaaaagagtatcgaaacattagaagactatctggaccgtttaaaaggatatacaaaaaaactgcatatttgtggaaaaaggaacagttattctaaaaccgatccggatgccacctttatgcggatgaaagaagatgcaatgggaaatgggcagttaaagccagcatttaatttacagcatggagttgattctgaatacattgtatggctgacaatcggaccacagcccacagatactaccaccttaattcccttcttaaaggaaacagaagaatatctgacatttaagtatcaaaaaatcattgcagatgctggatatgaaagtgaagagaattatgtatttctagatcaaaatcagcagttggcatttatcaaaccatcgaattatgaaatatcaaaaaagagaaaatataaaaacgacatcggccgtatagaaaatatgaagtatgatgaaaaaagtgactcttatatttgtaaaaatgggaaacagctgccctttacacatctccgtcgctctaaatctaaaaccggatatatcagtgaaaaaaacatttatcaatgtaaagaatgtaaagattgtccttacaagaaagagtgcatcaagggaaataactgtaaaacaccaatagaagagcgaaacaaagtgctttccgtagcaaaaacatttttgaaatatcgggaggaagatttggagcggattctttctgacgaaggaattcttcttagaataaatagaagcatccaagcagaaggatcttttggtgaactgaaacaggatatgcagtttcgcagatatttgagtcgtggcacagcgaatgttcttgctgaaagtgttttgctggcaatggcaaaaaatgtaaataaacttcacaacaaaatccaaaaagggaaaactggaaggcatttatttcctttgaagagtgcataaatttagagaatccgaaatttttttcaaatccagttttggattgtattaaagtacggcttttttacgaaaaagctatcgtttcaatagaaacagagcaactatatagcgaaaatcagaaaaaaggaagctgccgcttcacgatttactaatcgttaaagcgacagccccttgtctgactcgaaattcatcatctcgcaatatactttcactgtctgaatatttttatataacagcctcatttttaatcatgaagccgaattgtaaacgaacttcgatcacttcttatgaatgaccgactatatgcgattgctcttccattgctgtcccaataatcacagccaagcataatgatcgcaactccctccggagctcccaacaattttcttaactttgctgtcccttctatgatttccatcgtttgctgcatacttgaaagttcaatcccataaaatgcaaaaatatcctttatcgtaaatacagaagaatttacaacttccaattccggaagtacttccttcggaacataaatatcttctattgataacggttcgccatctaaagtaataaaatgtcgcacacaaaaaatcagatcctctggttcgatattaaaataatttgcaaatttatttcctgcaggtctgtatactttcgactgttcctttacggaaactcttttggatcctgaagacataatgcttacaaaaccaccgtgctcttccagattctcttcgtatttatcgccaacaacaaaaacaccttttccctgtaccctctgcagaaccccttcattcaccagagtatcaaccgcatttcgaactgtcaaacgattgatcccatacgtttctgccagtttattttccgatggaatcgctgttccaggcagatactcgccttcttcgattctatttcttataatttctcttaactgtaaataaatcggagtccgataacttaatttttcatcttcatataccattttttctgctgaatccactgtattctcctttatatgcctgcactatgactgctcattatcaatcctacttacaaatttgaatttatcacctctgagcaattgtttataatacattacaacaattccttcttcatcttcaattatccctgatgtaaaaaacagcggcgtctctgaaggcacttctaaaaattccgcttcgtgttcacttgcataagtaacactgattcgttcctcgccggcaacctgctttttatggtaaatatttttcacaacacgtcccatactatttttttcgttataatatttatcaaaatccgggaaacgttcacaatctatataggttgtttctaaaatacacggaatatcatcaatctttctcagaagaacatattcataaacctgacgccctaacggtactcgcaatttctttgagatctgtttggttgcttccatttttctgcaggaaataatttttttaaccaaaatagcaccctgctgacgaagctctccgaccatggaatctacaccaaccatatttcgattttttttgccgccggaaacataaacccctgaaccgcttattctatacagaacgccacggcaaaccaatacatcaaccgcttgtcttagtgtagatctgcttacgccccacatctcacacaagtctctttctgatggaattcttgtattcggcgctagtcgattcactacaataaaatcttccaatttttctaccgcttctacacctggcggaattcgatattccatataatacccctcccttgtattagttctgaatatgtattatattatcactttttcgttggttttccaactattattgtttattcgatgaatgtattttgctttcttttccggtaccaccaccagagcagaatacacctgcacacattatccattaccataaaaacccatactatttttaaattgttccctatcatacttacatatccccatgtcatacatatccgaattccccacatggttaatacagagaacaaaaatggcattttggtatctccaataccaaagaaaacaccttcatagataatcaatgctgcataaagaggctcactcacagccacgattctcaacaatacggcccccagtttgatcacatttttgtcgatcgtaaacaaggccatgataccggatgcttttgcaaaaagtccaattgccatcgtagtcataatcgatacagcaacaaaaagtcccgacttaaccacggattccagttctttttcactcttcctgcccatcgcattcccggaaagagtactgactgctgtttgaatcccatatcccggtacataaaaagcttgctcgatgattaacgctattgaatgtgctgccacactcagtgttccaagtcctgcaaccagtcctgaaaaaactacataaccacatcccatcaccattctttgtccgaccaatggcatagaaactcgaatacaatccttcaaaattgtccacttcggtctcaataatccgcctgtcaccgttagcaacggattacgcatcgcagcaataaaaattgcaattcctcctatgctctgactgagcgctgtagcaaaagcagctcctttcaccccccagcctgctcccggaattactattttttccccaaacaaaacaaaggcagtacctgtgccaatcaacaattgatttaatataatatttaaaatatttacactcagattgatatataatggcgttttggaatctttattcgcccttaaaatatttccatatacgatcaaactccctctaaacagcaatggacagtttataatgaaaaaatattcgctcgcatctttccatatttccctgcttgcgcccatccactgcggcaataccggactgatcagcaatgcaatgattgtttctgcaatccctaaaaaaacaacaacccacagagcctgtgccgatgtgcgatgcgccatcactacatccccttctccggtatacctcgctatataacttagcattcccatactaacagcaaaaaacattccattgaacagccagttcactgtagctgtcaatcctattgcagcactcgcgatcgcaccaatctgcccgaccattgcagtatcaacatacgacacaaccgtttgcagcagttgttctacgatcgttggcatccccagaatccataattcatgcagcatagaatctttcctgtttgttttattttggatggatgtatccatattcatcgcctccaatattttttcattttgtctattgacttttaaacatgatgtgatattctttatttataattgtttgttattttatatacttatctacataaaaattatatcatggaggtgttatcatgtcaattatcacaatggaccagattgctgttatgagtgtgcaatacgtacactacacgttcgattactatcttgattcgatgcatcaatgcggtatcaagaaccttgatccatggggcggatccccccattactgcaggctcgactacttaacctcgtcatctgcagaacgaaaacttctcgagatgagacgaaaagcagaaagtctgggaatgaaatatgttatgtatacacctgaaacccttggatatccatatagtttcagtgcgccagaacagcccatccgggatcgtacagtcgattactttgacatggcaatggatgacgctctaacgcttggtacaaaccgtgttttcatgaacagcgggtgtggccctctcgatattccaagagaagacagctggaagcgcgccgttgaaacgatacataagatttgtgaaatggctgaaaaacgtggtatttctattttacttgagcagctgcagccatatgaaagcaatcttttggtaaatcttccgcagatgaaggaaatgctcaatgaagttcacagcccggctttaaagacctgcgtagatttgatcgcaatggaagtcgcaggagaaaacctggaagattactataacgtattaggagaagacaccattcaattcattcattatgcagatggagatccatccggtcattttattctcggagacggaaacctcccattaaaagaatacttgaatatcttagaaaagcataattataccggaatcgtagatttagagatcaatgactccatttactgggacgatcctcatacttctgtacagaggtctgtcaactatctcaaagaaaatttgttgataaaatagtttttgccatatcagaaacaacatataaaaattcctcttttgcaattctgcaaagaggaatttttatattgacaatatagccttaatatcctgctttatccatcatttcacgaatattgttaattgctcttcttccatacattctaggttcattgatatatcctgtaaccaattcaattgtcgccgttccctgataatcaatgtccttcagttcataaaacagctcttgcaatgggatctgaccttctcccggcataacatgagaatccgaatcagatactccatcaatgatatgcatatgatacatcttgtctcccaacttatcaaaataatccataatactctccgattgtgtaaatggtgcaacaatatcacacattccaactaaatatggagaatcaacccgtcgaaagagctcctgtaaatcattggcattttttatcacatttgactcatatgttgtcaatgtttccatgattaatttatgctgtatcttttctgcatgatccgctaattcccgcacagttttcaccaaacgatcccacatttctttgtatgtggttccatagcccgaatgccctgcactgatcagtgtaaaatctgcacccatttcttttgccatatccatagaggtcttcaaatactccacggattcctgccgcattgcttctgtgccgatcatatagttaaatggatatgcattgtgttccggcgtaaatccacggacaggaatctcatacttctcgatcaaacgccgaacttcatgaatcgcacctgccttcagatcatatgtatacgcatgtggacgagctccccacagctcaatgtagtcatatccaaatcttttcgcatcttgaaaacaatcttccagcggatttctctgatatccacttgtaaacattcctattttcataatcaacctcctaaactcatataattctgcctctcatctccgtaagtttcatcctgcttccagtctacagaacaccatgctcatatcatcactccttccttttttcgatttatttttataaatcaaactcatgattcagcattttcataacaatttcttctaccacagcgtgattgttatctctttccataacaaaatccgcttgatttttcacaatctcaactgcatttccgacagcaattccaacagcagccctctgcagcatatccaggtcattgtaatagtttccaactgtaattatatcttcataagcgatccctaattcatttgcaagaatttcaattccctgccattttgttatatccctgtctataatgtcaatggaacccggttcagaatttgtgtaggtcagctcagatatggaagaatcaatatatgcagctacacgttcccaatcttttgctgccataaaactttctatcttttcctgaaaatccactttttcaaacacatccacaaccttcggcaaaaggttgatttcctttgcgtattctgcagttgcatctgtcattttagaaacataccatttaagcccattgcaccattgaatctgaagtccattttccatacaatatgaaattaatttcttacaaacctctggaggaatcctcttatcatataagatttttttatctgcacaccgaataatcttcccacccgtattaaggatctgataatctgtgatccattgatcctcctttaatgtaagcatatcaatttctcttctgccggaaacgaatgcaacaatacatcctttcttctgtgctaattgaatagctctcttacttttttctcccatactataatcatcacatacagacgttccatcaatatctaatgccaataactttttccccatttcgctcctctttttcgttttaatatacaattatcgttttttcaatacactttacatctataaattatatcatcggtatatatgatgtcaatattttatttattatatctagttttttatttctaatataagttattttaaacaaaaataaatatttttaatgatatatattgaatattttgtcctttcatgctattatccactcatctagtatatgtacatctttataatttttaatacacattttccatataatcagtttgtgtgtatgctatatttttttgaaaggaggtatttttatgaagacactttataatttctttcctgaatattctgttcttgttcctgcaacagaatattctacattatcctggaaattattcttccttacttgacatgcgaatttcgtcaattacatcatttcaacaatgaatactgtattaaaatttacaagtaaggagattttttatggatgctgtatatgtaggatggttatcaatcctcccgccagtaattgcgattattctggctttgattaccaaagaagtacttttttcactgataaccgggattctatccggtacactaatttattctttcgcgtcaggtgccaatccgattatcggatctgtttccaccgcatttgaagtcatgattcaaaaaacagatatgaatatcatggttttctgctttttattagggggtttagtttaccttgtcaatgcatcaggtggtgcagaagcatacggaaaatgggcctctaaggtgattcgtaccaaacgctcttcacttttactcactagtttacttggctgtcttatctttttagatgactattttaattgtctgacagtaggaacggttatgaaaccagtcactgacagatataaagtcagccgtgcaaaattggcttatattattgatgcaaccgctgcaccaatctgtattattgcaccaatatcaagttgggctgctgcagttggaagttatttaaaaaatacaggtgcatttgactctgaattcaaagcctttattacggctatcccatacaatttttatgcccttctcagccttttcatggttttacttgtgtgtgccttttcactggattttggccctatggcaaaacatgaagcattggcaaaaacaggggttttaggagaacttgaagaaaaaaatgcagacaaagaagtttctgcaaaaaaagggcatgtcattgacatgatccttcctattctcgttttaattatcatagcaatcctcggaatgctgtataacggcggctattggagcggtgatcctgctttgcacagcatcactgccgcgctcggaaactgtgttgctgcacaagctctcgtttggggcagctttgccgggctgatcactgcactttgtttgtatgttcccagaaaaattatgagtttcaaagaatttatggacaacttcacaaaaggaatgcagcaaatgatcacttccggatgtattctaatgctcgcatggacaatcggtggtatttgcagagatttattaagtacaccggcttttgtaaaaacatttgttgaaacaaccggacttcccggtgcatttcttccggctttggtatttttactttctggattcctaagttttgcaaccggaacgtcctggggaacatttggtattttaatcccaatcattatccctgttgcacaagccatttgtcctgatttactcgttgcttccctggcagccacacttgccggcagcgtatttggagaccattgctcaccgatatccgatacaaccattctctcaagcgccggtgccggtgtggaccatttggttcatgtttctacacaaatggtatattcattaactgtggcagcctgctgcctcattggatatcttgtgatcggtttgacaaatggaaatctgatcctatccttagttgtttctgcttcatgtatgataatattgatcttggttatgcataagcggtctactgcaaagctaaaaaaactataatttttcactaaatcgagtaggagagatttctctaaacgaaaaatctctcctactcacaccaccgtatgtaccgttcggtacacggcggttcaatcaacttaacaggcaacatccctttccgtgtcgtaatctaataattcttaatctaatacctcgccgtttgattctataactttctatttctccgtcttttttgtattttggataatctacagccccaagaccattctctacaataaataatggtttttgatacctgtcataaagcgtgtttttcttaaaaaatgctataacacatcacttactttccttctatttgaataacttttgtcgccacggcctcccgaaatgcctgatcatgctcgaccagaagcatcgtcggggagaattcccgaatcagctgttcaatctgcatccttgaatacagatccacaaaattcagcggttcatcccacacatataagtgtgcctgttcgcagagactttttgcgatcagcacctttttcttctgaccaccggaaaaatcctgtatttccttttcaaactgaaccctctcaaaatccagtttccgcaggattgctttgaataaagcttcctcgatctggttctttttcgcaaaatcagaaagtgacccctgcaaatgtgacgcatcctgtggtacataagaaatgataagtccagctcccatcgtgatcgtccctgtatgctccaaagcttctcccgccacgaatttgagcagactgcttttgccgcttccgttgcttccatccaataccacccgttctcctcgatggattgaaaaggacaccggacagctgaccggattttccccataacaaactgccgcatccaaaaacgtaaccagtgtatccgaacggtattgcaagggcagcagctttaactcttctgcccgctccctgtttttcaaaaggcctgacttctgctcgattgccttttgctgtcttgcctcgatcgacttggcacgtttcatcatcttcgcggacttatgtccgatataccccttatccgctgccccggttttggatgcttccactcggtctgaccatccttgtgtacgttttgctgactgcgaaagccttcggatatcctttttcaaagattcattctgtgcttcttccagtcgctgctgttgttcaaaattttgaaaaaacgcagaaaaagtacctctctgtacttcaatattacttcgattcaaagataaaatatgatccacacacccatccaggaaacacctgtcatgggacaccagaataaatcccttcttttttctcaaatactccgatacaatctgtctgccatgtgtatccagatgattggtcggctcatcgatcaacagaaaatgtccttccttcaaaaacaatgctgcaagaagaactttcgtctgttctccgtaggaaagtgtctcaaaaggacgccaaagcacttcttcatccacttccagagcgtaaagttctttccgtatctgccactcttctgcctgcggacacacctcattcaggacttccatcgtccacttttttgtatcttttaccggatacggaaaataatcaaaccgaacggattttataattttcccccgatactcatactgatccatcaaaagatttaaaaacgtcgtctttcctctgccgtttctccccacaaatcccagtttccaatctgtgtcaatctgaacactcacattttcaaagatcggatcataactggacggataagaaaacgtaagattttctacttttatcatcgacattgctccctgcctcctaacgtcaaaaagctgcaggaaagtcaattcctgcagcttctcatagcacaaaccatccccatatcagacgtatgcggccaatgatccatatctgtgaacaagactcttaactttcctgcaaaaaggcgcaatcattgcgtatccacacaatcactgctgttttccattctacttgcaagaaaaattaatcatcctttcacctctttcatttcaaatctgtttctaacataccacaagatgaaaaaacaggcaagtctttttggacctgcctgtcagaactctttgttttggttacaactcttcttcccactgcgcttctttaaatccaaccaggacacgctcttttgtcacaacaatcgggcgctttacaagcattccgtctgtagcaagcagttccaactgctcttcctcgctcatttccggaagcttatcttttaatttcatttctttataaagcattccgcttgtattaaagaatcgcttcagcggaagcccgcttctctgataccattcttttaactcttccagtgacgggttattctctttgatatctcgttcttcgtaagaaatctgatgctcgtccagccactttttggcacgtttgcatgtggtgcatttcggatagtgtacaaataacatctctctgtcttcctttcccattcgattttgtttgtattctatctcttttttccgacttttgcaatcactgttttctcttcgcagatacttcttttcgttttcctgatcctacaaattttttgcacaaaaatccataccctccttgcgaatttatctcaatatgttaaaatataaacgttaatatgtgaatttctatggattgacaaaagcatagtgaaaataaaggaggaactttaatatgcattgtgtcagaaaagtaaccgaagacttatactgggtaggaagcaatgacagaagacttgaattatttgaaaatattttcccgatccagaaaggagtttcctacaactcctatctgttattggatgaaaagaccgttctttttgatacggtagacagcgctgtcggcagacagttcctggaaaacatcgcctctgtattagacggacgtactctggattatcttgtgatcaatcatatggagccggatcactgctccttaatcgaagatctgcacctgcgttacccggatatgaaactgattggaaatgcaaagacattcccgatgatcgatcagttctacggcatggaacttggtgacaaaaaaattgtgatcaaagaaggagataccttctcctgcggaaaacatacgcttcactttgtcatggctccgatggtacactggccggaagcgatgatgacttacgatgattttgataagacattattctctgcagatgcatttggtacattcggtgcactcgatggtgtcattttcaacgatgagatggatttcgaccgtgattttctggatgaggcccgccgctattacacaaatattgtcggaaaatacgggatgcaggtacagaatgtcctgaagaaagcagctgcattggatattcagatgatctgccctctccatggacctgtatggagaagcaatctttcctatattctggaaaaatatgatatctggagcaaatatgaagcagaaacaaaaggtgtgatgatcgcctacgcttccatgtatggcaatacagaaaatatggtcaatgttctggctgccatgcttgctgatgccggagtcacgaatatcaaaattcacaatatttccaagacacatgtgtctgaactcatttctgacagcttcaaatacagccatctggtacttgcagcgccaacttacaacaacgggatttatccgctgatggcaaactatctggatgatatgaaagccctcatggttcagggccgcaccgtcgctgtcttaggaaacggaagctgggctccacagtctgccaaactgatggaaacaaaattagcagaactaaaaaacatgacacttctgacagagaacttcgcagtcaaatccgcactgcatgattctcaaatggaacagttacaggaactgtgcacaaaaatcatagaatctctttaaattctgcgacatacaaaggaggaattcatatgaaattagtaatcactatgagccgtcgtttcggaaccggtgcaagtatcattgcaaatgaactgtccagaagactggacattccggtttatgaccgtgcctatattgaacagcaggtcaatgatcacatgtatgactccgaagcagacgccatccgcaaacttgctgaaaatccatgtatcattctcggacgatgtgcttctgatattttaaaagaccgcatgaatgttttaaatatcttcgtgtgtgcggataaagaagatcggattcagcgaatcatgaatctggagaatctctcctacgaagatgccaaagagaaaattgaaaaaacagatgaacagcgtgcgtcctattattatgagcataccggaaagacctggggtgacgtgaatgactatcatatgattctggatacttccgcacttggaattgaaaattgtccggatattttgatgcattatttcgaaaaactggaatatatttaaatctgaacaaaacgcttcatacaacaaaaagagctgctgctttggggaatcctccaaagcagcagctttctataatttaaatccttcttttctattttacgatcttataatattctcttgacgtgattgcaaagacgatcacataaaatactgcaaacaccgcagatactccaatcgtacacatcatggacaaatgcgtatctgacagattaaacaccagcagcagtttggtgattggcttaaacgcaactgcaacgtgcagaactgccataagaagcgggacaaaaaatactgtcaatatctgacttcggatcgagcttttcacttcttttctgctcattcccactttctgcatgatctgatatcgctctttgtcatcatatccttctgaaatctgcttgtaataaatggtcaggaccgttgccatcaagaataagaatcccacaaaaattccaaggaagaaaaatcccccatagactccataaaactcctgcgcataagcttctctatactccacataacaggactgtgcttcctcccccgtttccattcgtgttttcatagcttccagtgcatcacttttcgcagatttctcccctttcatatcaaaattcatcaggtactgcattgtaatctgcctctccgttggcccgtacagttgtatcatgtgctctgccgctgtttcatctgccatcaccagatagacattttctgtgaccccggattttttcttttcctgcagcttcgattcctgtaaattttcttttacatgataagtctctcctgctaccacgatttccccgctgtcaaactcttcatccggaaaatacgtcagcacctcgtctgctgccagtgaaacgtccgttccttccagtgcattgtaatctgccagtggaagtacatacagtcccctcatcttatccgcatcgtatccatttcccgactccacatcaaattccagtcgatttccctcttttaaggcgctcagaggaacatatcgatacttttgttcatgaacgatctgtaaatttctcttttgtgtctcttctgttacaatctgttctattacctggatattctctggatctgcctgaaacgatatgacagaaaactccttcttaaacctcgtattcatgatattttcctgtccgatatacaacgatgcagtcgccgatatgagcaccagtacgatggtactcataatgcagatattggcaagtcctactgcattttgtttcattcggtagatcagacctgacacagatatgaaatgttttgtcttataataataggctttatttttcttcagcagtttcaagaaagctacacttcctgcggtaaacagcgcataagttccgaaaatcacaaggataacggcaataaaaaattttgtgatcgcactaagcggtgactctgtcgtctgtgcaatataatacccgcttcccagcaaaaggattccgctcactgcgatcagccagttggcctttggctctttttctcctttttttccgccttggagcaattccaccggattcactctctgcacctgcacaacattccaaatcagtatcacaaaaaagatacctgcaaataaaacaattgtgatcagaattgcttccggatctactgaaaacttgaatgcaacatcaaatcggatcaattttaaaagcacaagaaaaatcaaacgtccaaatacgatcccaagaagaattcctccaagaatccccgctcctgctgtatatatactttcccagagcatcatcttggtcagattcttcttatccattcccagaacctgatacagtcccatctcctttttcctctggcggatcagaaagctattcgtataaaagagaaagatcgccgaaaatccccccgtgatcgacactgcgaaattcaaaatcaaacgcagctgggatgctcccggcatagtgttcaatgcggagttggtcgaaaccattaagaggtcataaaacatcatcacagtcagcatacaggtcagaagatatgggaaatacgtctttccattcttttttatattcgttgccgccagttttggatacaatactttacgcattgtcctcacctcctgttgtcagtgcagtaagtgttgcggaaatcttttcataaagcgcctcattattcatatttcctctgtataattgatgaaatacttccccgtctttgataaacagcactctgtttgccgtacttgccgctttgacactgtgcgtcaccatcaggatcgtctgtccctgctgattgatttctttgaataatcggagcagttcatctgcagacctggaatccaatgcccctgtcggttcatcggcaagaatcagcttgggctgcgtaatcagtgcccgtgccactgctgctctctgcttttgcccgccggaaacctcatatggaaatttattcagaagttctgtgattcccagctgacttgcaatgggttttaatctctgactcatctccggatactttttaccggaaagtaccagtgggaggtaaatattatcctccagagaaaaggtatccaaaaggttgaaatcctgaaacacaaatcccaggttctggcgccgaaacgccgccatctccttatttcggatttctcccagatcccgtccttttaggtacactttcccagatgtaggtttatccaacgctgccagaatattcaacagtgttgtttttccggacccggattctcccataattgccacatattctttttcttccaccgaaaaattcacattggacagtgcctgcacctggtttccaccaaaccgtgtcgtatatatttttttcagatttttgacttccagtaatgtcattgtcattccttcctttcatttctcctgttgtcttacttctcgtttattatacctgtaaaacaatcctgctttccatggattcacattacaaatcacaagtacaaccttacatttttgtaagattcttgcctcatcctctttgcaatgttacaataggaaccagtttgaatacaaaggagctttcagatatgaaacaaaaacaatggaaatccattttaaaacctctgacctttcttccggtcattttcatgctctgtaccatctttggtttttccaatcaaaatgcggaggtttccggcggattgagccagaaagtaagcagacaggttgtcaccgtttatgactccctttttcatcagaactgggacgaagaagtgatcgagcagcacgcccggcgaatcgaataccccattcgaaaagcagcgcatgtcacggaatatctgattctgacactcctgacagtcctgccgctttctgtatatggacttcgtggaaaaaagctgatctttgtttcctttttatgctgtatcctatccgcagccggagatgaatttcaccagtcttttattcccggaagatcccctcagtttaccgatgtactggtagacagtatcggaatcctcatcggctgtgggatctcctgcctttttctacgtaatcgcccgtcccgcacaggtctttcgaagcaggcgcacacacacaaatgacaatcctgcaatgacagccagcaggaccggaactgcaatccatgcggagattgcagtcggttctgcatattttttatacgcatccagaaaaaggatgtggatcagataaattccaaaagagctctcacataccacctggatcctgttttttgtacgttcttttaatggtatctcacagtttttccatcggataagaagcagaaagaaagcggttcctgcaagtacgatcaaaggacatccgtattccaggactctttcataatgttctcctgtcttttctgtcatccagagtgtcagaccaaaaacacttcccatggacactgccagaatccagaccgcctgtttctgggtgattcgaatatgccttctgtatttctgaataaaatatccaataaagatataaaacatatagacccggtctccaatcagcggcagatcataataggcctctccgttttgcatagaagccacataggtaaaaataacagaggcgctgcagaccaaaagaagtgcgcgctccagttttatatgcatgcctttgcacatcacctgaaaaaacggcagtaccatatagatgggaatcattgcataaagataccatagatgtggttccgcaggcacatataaaatttctgacagatcatactctgtcttcatatatcccacattccagatataatatactgcgctccagactgccagtggaataaaaaaacgaatcagacgctctccgtgttttttcagcggttcttctcttcccaaaaggagtgctccggatatcataaaaaagcaggggacactcactctcgccagagtatccagcaccaatgcaaacagatactccccctgtgtaatgtctccgtaagccctgcaaaaataattggttatatgaatgacgatcacaaacatgcaggataacatccttatgatctccaggttataatttcgtttcatctgtcttctctttctgtcttattcttctgtagcatccgattcttttttcatcatacttgccttgatgacagtcccttttccaaatcggatatccagctgttccattgccgcctttaatttctgatgtttttcatccaggggctttggaatctcaatatcaaaaatagaaagctgctgcggttcatgttcatctaccagttttgctgtacgaatcccaagcagtcgaatgggttctccattccatacttcttcaaacagctcacatgcgttctcatagagaaccttctgatctgaggttggacggatcaattgtctttgatgggaaattctgcggaaatcataatatttgatctccacactgaccatggatgccttttgccctgccttttgcagccttttcgaaacactttgtgccagatggaaaaacaccggctgaacttcctgcatcgactctgcatctttggataacgtggtcgaattgcccaccccttttgcatctgcctgctgtgactgtacactggaatgatcgattccatttgcaaattcccaaagcatcttcccatgactctttaaatgcagcataatcagcccgggatctgccttggccaggtctccgatcgtaaaaatttccagctttttcaaaatttccacactggaatgccccgccatatatagctctccgatcggaagcggccacatcttcacctggatttcttccggaaacaatgtatgcactttatccggtttttcaaaatcagaagccatctttgccaacagcttgttggaagaaatgccgacattgacagtaaaaccaaaggtttcccggacaccgtttttgatggacagcgccgcttccaccggggagtggaatttcctcactgtctgtgtcatatctacataacactcatccacactgacctgctcgatctctttcgtaaatgtccgaagatattccatcagcatccggcttttttcccggtacatttcatgatccggcggctccatcaccagattcggacacttacgaaaggcattcgcaacaggttcccctgtgcggatgccatatctttttgccggaatagactttgcaagcacgactccgtgacgggatttctgatctccgccaatgatggacggaatcttccgcaagtccgtaccggctccattgtttaattgttcgactgctgtccagcttaaataagccgaattgacatctatatggaaaataacgggtgtcatgcgacaatctgtcctttcacttttgcctccaatgttccgtcaacaacgtcaatttcaattctgtcacctctgcctacattgcccgcaagaatcaattttgctgccagagtctctacattcttctgaagatatctctttaatggtcttgctccgtacatcggatcatatccgccttctaccacgaagttctttgcagcgtcggtcagttcaatggacaattctttatctgccagacgtttgttgacatcttttaccaacaagtcaatgattgcatgaatattggatttcgtcaatggtttaaacataattatttcatccagacggtttaaaaattccggtctgaaatgagctctcagatcattcataacaagttcctgactgccttcttcaatggttccgtcttcccggattccatccagaagataattggctccgatattggacgtcatgatcaggatcgtattcttgaaatcaaccgttcttccctgagaatctgtgattcttccgtcatccagtacctgcagcagcacattgaatacatccgggtgcgctttttcaatctcatcaaacagaacgaccgaatacggttttcttctgactgcctctgtcagctgtccaccctcatcatatccgacatatcccggaggtgctccgatcagtctggacacagaatatttctccatatattcactcatgtcgattctgaccatactattctcatcgtcaaacaggctctgtgcaagcgccttggcgagttctgtctttccgaccccggtaggtcccaggaataagaacgaaccaatcggctttgtcggatctttgatgcccgctttggaacggatgattgcctctgtcaccagctcaactccttcatcctgtccgatcaccctgcgatgcagttcctcaccaagatgcaaggttttgcttctttcactttcattgagttttgccaccggaatcccggtccatctggaaatgattctggcaatttcttcatcagtcactgcttcgtgtaccagagacaactcttttgcctttaccttctcctcttcttcctccagttgtttttgaagctgcggaagggttccatactgaagctctgctgctttattcagatcatattctctttgtgctttctgaatctctttgttgacctgttcgatctcctcccggattttctgtactctttctacggacgtcttttcattttcccactggactttctttcctgcgtactcttctttcaatcctgccagttcttcctgaaggtgttccagccgttctctgcttaaacggtcttcttcttttttcagtgcttcttcttcaatctccaactgcatgacccggcgtctcagctcgtccagttccgtcggcatcgaatccagctctgtcttgatcagtgcacaggcttcatccacaagatcgatggctttatccggcaggaaacgatcggaaatatagcggtttgacaacgttgctgctgccacaagtgcactgtctgtaatcttcactccatggaatacttcgtagcgttctttgagccctctcaaaatggagatggcatcttccacacttggttcctccaccagaaccggctggaatcgcctctcaagagctgcatctttttcaatatactgccggtattcatcaagtgtggtcgctccaatacagtgcagttctcctcttgccagcatgggttttaacatattgcctgcatccatggctccatccgttttccctgctcctacaatggtatgcagttcatcaataaacaaaataatctttccatcactgtttttcacttcttccagtacggctttcaaacgttcctcgaattcgcccctgtattttgctcctgcaaccagcgcgcccatatccaacgcaaaaatcgtcttgtctttcagtccctccgggacatctccactgacgatccgctgtgccagaccttctaccgctgcggtcttaccaacacctggctctccgatcaataccggattattttttgttttacgagataagatccgaatcacatttcgaatctcttcatcacgtccgatgacgggatccaatttctgatctctggcccgttctaccagatcctgtccatatttattcaatgtatcatatgtggcttccggattatcactggtcactctctgattccctcttactgtagaaagtgcatgtaaaaatccttctctgctgatgccaaactcccgaaacagcggtttcaattctctgctggcatatttcagcaaagaaagaaaaatgtgctctacagagacatattcatcccccatctgttttgcttcatcttctgcatggatcaaagcgttattcagatcctgaccgacaaatacttgtcctccctgcactttggggcgtttgttcaacagctcttctacacgattgataaacagcgttccctgaatgctcattttttccagtaactttaagatcagaccgtcatcctgtgtgatcaatgcgtataataaatgttcctgtgcaagttcttgatttccataatcgtatgcaatcttttcacagttctgtactgcctgcatcgaattctgcgtaaatttatttatattcatagcaactcctccttactatctggtttcattgttctactcgtaatatagcacttgttattagccacgtcaagaggtgagtgctaatatttttctgcttttttgttttacaacacttgttgctcataccaacttttaaaggttggtatgagcagacgtgaaaaaagcgataatcctgtgttttgattaccgctctcaccatactctgttctattttaattttcgcaggatcgtaaagagaaagatccacactgctgccagcgcaatatgcgtcaaacctgcgattcctgcaatcgctgcatctgctgcatgagacaatgaaatacctgctgtctggatgataccacgacagagcataaccgctgtaaacaacggcagcacgatattatataacgttacaaacgtgcggaattgctttttctcaagcaagtccgtgctttttgcagccagtcctaaaaacaaaaacaacagagttccaagcaccaacagatgcacatgcagatatgctaatgttgtttttcctgtaaaatcaaaatattttgtaaattccctgtaaaacacacctcctgccatcgctgcaagaaaatatccaaatgccagattccataactttttcatacgtattcctcttttctatctgtctgtatatctttttccctgaacataacggatcccaaacagaatccccgccaaaaacagtgccatccccagcccggaatagaataccgcaataaatccctccggtacaagatgggatgcgcgcagaccgatcccaaatgtcatcataaatgccatgatcaaaaatgatttcttatcaaaaaagtgccagaaaaactgcagttcttcctcatacttgtggattctgtctgtatgctttaagaccagtctgtaaaataccataaaccagaatgctccaaatacagccaatgacagcaagagattccaaagtgtcacatgccccggataactgagcactccaatccttaaaatattaaaaccggcgatcatccatacaatacttgcaaggatcagcaacgttcttttctttaccttcatctcatttctctcctctctcctgtatcacaggattttcttttcctctgcgctttttgtaacacaacttaatatatgctatgtgcgatcattgtcaacagtggtttgcagttatcctgctgttctaataaaagagatatcagaagggtcattacatatccggaaaaaatttccggtgtcagaccatgttcaaatgcatccttgcggactttccggtcttgcaataaaattcgcaccttcattctgaacattgttcattataggagtatttcctattattgtcaattgatttttaaaaatattttcatttctgccttttctttcttcagaacagcaattataataaacaaagaaatactataaaaaatcaggagagaattgatatgagagcttatgaacgacttttaaaatatgttactgtacgcacaccaagcgatgagacaagtaccacggttccctcttcttcctgtcagtttgatctggcacaggatctgatccgggaatttatcaatatgggtcttccgaaagcacgtactgatgaaaaatgttacgtctatgcacaaattcctgccacaccgggatatgaaaactgtccaaagcttggatttgtggcacatctggatactgtttccgacttttgcgacaaaaaaattgtcccggttgtcacagaaaactatgacggccgtgatttgcctcttggcggttctgacggacgggtactttctgtagagatgtttccacatctgaaagatctcaaaggacgtacgctgatcaccagcaacggcgacaccatcctcggcgctgacgataaagcaggagtcgctgagatcatgaccatggcagaacgggtattgacagagcagatcccacatggcccgatttccatcggatttactccggatgaagaagtcggaagaggtgccgatcattttgatgtagaaaaatttgatgcagattttgcttatacaatggatggagatacagaaggagaaatccagtatgagaactttaacgcagcagatgccgtctttgaaatgaacggagtcaacgtccatccgggttctgcgaaagatgtgatggtcaatgccgcacttgttgcaatggagatcaacagtctgatcccggctggagaaactccccgtgataccgaagattacgaaggattttatcaccttgtacaaatgtcaggtgacgttgcccatgcaaaacttcactacattgtccgtgatcacgatgccgatcaatttgccagacgcctggataccctgcgcgaaatctccaaacagatgaatttgaaatggggctttggcactgtaaaactgaccattgatgagcaataccgcaatatggctgaggtcatcgccaacggcaatatgcacctcattgaaaatgcaaaaaaagcctgtcttgcagcagacgttcccccgcttgtactcccgatccgcggcggtacagacggcgctcgcttaagcttcatgggacttccatgtccaaaccttggaaccggcggacatggatatcacggaccatttgaacatattactgcggaaggcatggacaaatccgtagatgtgatgatcgaactggtcaaactgtacgcagaaatgaaatcataagcatttcacccactccttctgcaatataccaggtagcgctttgcattggagccatagggatggcaggtcagcagcgtgaccagatcttccccgggacggatcaacagacggtccgtctccgtgggatccacaataacaatctctgacacctcataatgcagcgtttcccgaaagttttctatgagcacctcatcccccatttccagtcgctcaatatcccggaacatggctgtcttgctgtaccctctgtgggcagcaatcacactgttggtattttctcctcctatgggataagacgtttccgtcagctgagctgccccaagcgccagatgttcctctgtagctcctaaataaatgggaagttccacccccattttatcaatcttcaaaaatccaacaacgccgtcccggattccatatgcagacagatccaacatttcctgtgcatataaaaagggatcccttactccggattttctggagagatacagtgcctcattccgtctggtcaattcctgatacaaggcttctgcctgatcttttgtttcgtttttctcttcgaaaaaatgctcctttttctctttgacttcctgccggaacagaaaatccgtcatcttcggatactgaaagatacacactcctgtcaggatcagaagaatccccagccaataccctttcttcccctttttcatggtcttcgttttcctccccgtttctgattctttcttcttccaacggttctcccgatgatacggactacaccaatgattcctgccgctgccagaatcccgatcaaagaatacttccacggcatcaattttccaagcagagaatcctttcccacatcctgtttattctccggaacatattctgtccgctccccggtcactaacagacggtgcgtgttcatcccatagggggtacaggtaaccagagtaaccagatctttcccctgaggcatgatggtcaattcttgcagctgttctggttttacggttttgatctcattgactttgtaggcatggatttcatccaatacatacagataaaactcatccccctgtttcatctcatccagtctggtaaagagttccgcctgaggcagtccacggtgtccggtaagtacagaccgcctgttctctcctccgacagggagggctgtcatctccagatgccccactcccttttttaaaaccgcctcactggtgccgtgatagaccggaagtttcagatccagttttgggatctccagatagcacatgatcccatcctccatatccagtacttcctcataattatccggaattgcatagccgctccccactaagaaaggatcatggaccggatcgcctgcgatattctcattataaatgcgcgccgcctccagggctgcctgccgctcttctttcgaagtgtcctccactgttgccacataatggtcgatcacctggttctgttcctgctctgcaaaatagttgctgatcagcggatacaaaaaaatccccatccccagcaggatacttcctgcggcaactacccagatcataacactatcttctttccttttggattcttgtcgtccttgttttcttgtctgctcccggcgctgctgtcttcgttgcttctgccactgttttcttcgtttccgcctctcttttttctcccgctttctccttcgcttctctgcccgattcctttccatttgtctgtccttccataaaagaaatccgaagcagaacgtctggctctgcttcggcatttcttctcctattattctttccacatgtgatgtccgtgtctatccctggtgtttccttctgtaatttacgatcagtgtcagacctcctgctaccagaatcacacccaggatggtaaagaggatggttcccattccaccggttaccggcatgatcggaggcttactgttttctaccgtctgataatagatatttttcaacgttgtactattgtcaacatctcctccatcatccacaataccgtcttcgttggtatccgtgatggtaatttcgattggatctttcagcaattcgaatccagccggagcttttgtttctttcagataataggttccggttgccagacctttcagattcagcttaccggctctgtcgccagattttccaactgcaagcgttgttgttcctgattcgtccgcttttgccagacggtagtttccttcatcgcttccaatctctacgaatttgattgctttgttcggatttgtcacctcgtctttttttgcaaacagctggaattctgcgcctgccagcggttttgtgccgcctttttctactttggtgatctccatctcatagacaaatactttttcattgtctgttgtcgtttcataattgtcgttgttatatggatcattcttacctacaaatgcttcattcttcaaggcattgtcattgtcaaatgcatattcattgatcgtaccctgataggtcactttgatttcttttattggttttccattggtggttccataattgttgatcaattgatcatagtcgaagtccagaatgaacgtcgcattccgtccctctcctggggcaccctgttcctggattcctcccagaccgcagtcttttttattgtaatgataagtaaacactccggcatctgcattgatcggacgttctgtcccgtcactggacacggcaaatacctttaactgattgttctgaagctccggtgcaaaggtaattccaatcggcatggtgtctccaattcggaagattttagaagtcgcatcccccggaaaacttggagccggcacacgcagggtataatttaccacctgtccaatggacacggtgtggtcgtctacatctttttcgatagaaccaggggctcctttgagtgcagccgcggcatcttccactttccactcttttgttttttcatcatagacgggcagcagattcgcagtcagcgctgcatactcataatctttgtattttccattttgatccggtgttgccagaagtaaatagcctcccatctgcaatccagataataccgtattgtaagtctcactactgattgttcctacagcagatgacgaaagtgccaaggacgttccatggatggctgccttcatggcattcattaatccacttctaactcctgcctctgctttgagaaatgcatctgtcacttccccgttagtccctacataacttttgtaggcgtcgtttcctttcagccaggctgcaacagcatctgtccaaacatagaatggctcttttgcctgctgtagcgtaaaatcaaagttggcttccatgatctggtaagcagttaccgtagcattcgcatctgtggctgttccagtcactgtgatggaatacgttttttgttcttccacagcagcctgcacaggcaatgccatggaaatagtcaggatcagcgcgatacacactgacaaccatttcattcctacattgtgtcttttgctcctcataaaatttctcctcctttgtttttgatatcttaacttttttatgagttaccatgttttctccgccggatctggcggatgaccagaccggctcctccaaggactgcaaaggaaccaaataagaagtaataccaggtgcctctgcctccagtgataggaggatcaagaggtttgtagttataaaacccaatcgtaccttcgtctattttcactgttgctggcggcatttctccattgggtcctaatacaggttctatcctccatcttatatttacttccggaaacatatataaattccattgccctttcggtactgtatatccttttggcgcttctatttctacaaaacgatacacaccttttttaaacacatttttgtcaccatcaccggtgtcaaatacaagctctccccaccacctgtctgaagtggcttcactaagaaatttccaacacttttgttcgttttctttttgaattggcagcttatgatctgcatccgtatgattttccgggtcaatacattctaggcgatagagttgaaatgtagcgccacccaactgatttcctttttcatccagtttttctaggccaagtacccgaaacggagttttattctctacaactaccaatgttttcttctgtgtttctatctcaatatctttttttaccctctcttctttttgttcatctgtttctccagccttggtgactgttattatattcgtatatagctttgcattctcaccaacttcttccactgaaacgcttttaccttctggtaaccagaattctattttttcttctgcttttaatgtgaattttattttctctttttcgactggacattctattttttgaccttgtttttctccttggatagaaactggtattcgttctccttctattggttttaaatctagttcaaactcaaactctgtatttgcatcatgcccatctgcaaatcctcctgttacatacttcgaaactacaatttttccctgtttttgtaccagtttcccattgtttcccaaaaagactttcacactgccattttctgattcaagaatcggtttgttgacatatgatgctgttcctgttttgtttcccgcatcattctttgcttctttctgcaagttctcatatcgaaaagttccagctgcaaccatccactccccattttcagcttgagaaacatgatcgaaagatgcctcctcaattggcagatttaaaatctgccctcctttttccacattgtatactctcttctggtaataatattcattcccgtcatttgcctgtggtttttttcctgtataacgctcaaacgtattatcaggagtcttgtaataaacgggtgtttctcttgtataaaaataatagtcatttttatccgaaacatcgaaatgaaccattgctttagcttccgcaatttctccctgaagctcccacctatttgcataaaatgtgctagtttttgccaaatccgtacgttccacatatggatattctgaatctacctgaagaatcccatatcccttgacctcttctttcatcccaacttcataaaacaaatgtattggcatttcttctgttttcgttgtagtactatcctcaatattctctgccgatgtcatcacatcatatctaaccaatggaagcagagagcgaggtatagaaaatttcactttctgttcttgaatcgccagattttcttcaattctgactcccaatttcagcatctctcctcctgttaacgttcccgttggcattccataataaaagtaagagcggttaagaaaacttgctccctccggcgctgtttcatcttcccgatatggtgccatgtaaactccgcttccatctgcgtaccaggcaatacaattgctgaattcttcttccgaagtataggcaatctgtcctgtttcttgtgcatttaccaacaattcttttgcctgttctcccgtaattcccaaacgttcctgtaatgcattaaaaacttctacattttcctctggtgtaacatttccatttaaagctagctttgccgcaaaagtacttccactatttaacactccctcacacatcatcccatttatatgctccacatgcatatattccccaatcgtatcctcaaattttaatgttccgttttcaccttcttctgtgggtaattccgcagtctgaattttaatcaattctacaagctgtttaaaacattcctccagctctgaaccttttgttaccgcaaaatattcatcaacataatgggaatcttctatttctcgcaaccgatcatccacttttataacctgtagacttttccctgttgttgattgcaaccgaataggaattccggtctctgcctcaaaaaactgtgtccaccaaccttctatctctggatttctattcatagatggattcaaaatctcttgcatataaccaagctccactccatccaccaggtattcgattccaaaggtatagaagagaggcgtcatttgataggattcagccaaaacttttttaacccatgcccctgtcaactggttaacaaaggacatacgaatatcaattccatctaacatagtaaaagttgaatcgcctctttccgcatactttgcacttcctgctgttggcgctccatctgtcatcaacgtaataatcgggattctttcttctttattttcaggtgactgcatactcgacgtcaaacactctaatgcttctagccatccattttgcatatatgtgtttccgttcactatataaccatggttaatcccttccgaattcatctgacttcccgatgaatttcggactgtctgatctattcctattcgataataacgactgatcgtccttgattcatccacccaaagatagtctccactctctgtagtatattgatccataggaagcaggcaaaatgccgaatctaccgatgattcgccgccaacagtcgtaccagaaaaacagacaattcctactctgttctctggatttaacttttgtattgtcgtcatcaacttatttacttgttttactaacaaactaattttggttcctccgattattccgtccatcatagttcccgaaatatctaacaccaacatcaaatctaccggtttcgccgcagtcatcgtaacctcctgcgtagaactcaaggctgataaacctactagaaaattatcctgtccttttctctgaacaactttctctgtttcatttacagtgatatctccatctacaactgtcttgtctgtccaaatacgccccgcattgaaagtgtcctcttcctctgcaaacagcagtttccaattttcaatcgtactggcatctgccacccgttccatttctggtatagcttgcccatcttgtgcagccgcagacataggcatcggaactaacattccacagagcataaccacacaaagcatgattgccgttagacgatgtcccttccctgtcattccttctaaatttctcactttcctcctccttcctgataccccatatccacgagatgtcattcctttttctttcgactcctgtctgaaatcagaatttctatacaacaaaaagacattgccatatctcacattctcgtcagatataacaatgtctcttcttataaaacgatatacaaataaaacagatactacttatctgtctgtctgtctgtctgtctgtctgtctgtctgtctgtctgtctgtctgtctgtctgtctgtctgtcaaaattttatgatattgctccatttttttcaacttttacgacaccctttcagcttttctaaccttttccaaatatatttgaatttagtttaaaccaattttctctggatttcaagatacttttttgcaggggtgtatttttataccatagcttcccgctatttacttgctttctatttttcttccatttttcgaatcagctctttcatcacgaactcctctttttccacttcttctgcaatcgtagaaatcgatttccctttttcaagcttcttttggataaaaagagagccattgcttcagcgacattctgatatgcccactgtcttgcaatagctctcaaactttgctgcaatttttcggattacagtctctcaccgttttcatgcataaacttatactccgcaacagaacggtcaaatgtcttgatgtggttatacagccactctaccacatttttgtgaacagcctctacaaatgcagaagacggtccttcttcctcttctaacatattatagagatcctttacaacctgtcttaatttttcgtgctcttctttgtgtttttcaactcccggatatgtaatagattcctgaagtttttcctcttctccaaaatggaattctgtgtaatctgccagataatccagtgtttttacagacaccagtttgtctctgcttgtctcacagctgtctaacagtttgttgatcttgtcgatcagctccttgtgctgggaatcgatcatctcgtttcctgttaccagactttcatcaaattctgctctcatcatgttacctcctacacttcaccttttttaaattttatgatcatttcgttggttaaactgtctctggatggctccaccggaatctcttctctctcaaaccattccgccagtgccaattcttcttcatccagcgtcacggctccatctccatccagatcacagtaaaatcccattagcaaggtgtcactaaatgcccatggctgacttttatagtaccggatattttttactttcagcccgacttcttccattacttcccgtgccaccgtctcttccactgtctcaccgatctctgtaaaacctgcaagcagtgcatattttttatagcttcttccggcatatttcgacagcaggatccggctgccgtctgtcacaccgataataactgcagggcagatcttcggaaattccatattcctgcagttctcacaatagagcattcgctcctttgtatcatgccgcatcttatggccacaacgtccacaatatctgcgtgtctgataccacttatacaactgatatcccgtgatccctgcaaatgcgctgtactgaggatccactgttcgaaaaatctccgtattctccatcgtaaactctgaaagcggctcacggttcaggttctcagccagataataagccttctcatctatggtaaacagatacgtactgttctcataaatatcttcattcagacgttccagttcttcaaatgtgggaaattcaatcccctctgccgtccttcgcatcaatgccgcatgttcttcataatacaatacaatgctgtccttctgcggatggaccggtctgtactcatttttgaactgatgcggcgcaatatcctgtatcatctatgtcactcctcatccgtactttttatattataccatcttcttctgtttctgaaaacaagttttattcccgaatatagtgcaaaaattcatgaaacaaaatcaagatgctgcccgccataaggaaaaaatcccccaaattgtatgtgatcttcgtcagtttttcatttggcgtctgaaatccgatgtaatctaccacatatccccttgtccatcgatccagcgtattgctccacgctcctgccagacaaagtgacagacctgctttcttcagatgaccacccttttttcgcagacacaaagcatcccagatcgtcaagatcgctgccatcacaagtgatatctcttttaccgcccctggatgctctttgaaaagactcatacacattcctcgattgtgcacttttcgcagtacgatcttttggctttctgcaaagggttttgcttctccatccggccatgtctcgacctcagatttaactttcagatccaaagcacttaaaaataccgcagaacccacgccaaacagcttattcatctttcaccttttctttcacagactctgtcagatcttttacatgttcacagacagaatccgctgcctcctgtgtcttctctacaactgcctctgcgactttttctgtctgcttagccgtcatatccatgacatcctctgttttttcttttacaaattcaactgcctgctctgctttctctttcagcacatctcccgtctcttcccagatatccggttcttttttggcaccgcagtatggacaataagccatctcttttgcgacttgctttccacagtttgtacaggatgtcgtccctttgatcgtttcgatctttgcctgatgtttttccatactttctgttctctgatcgatcttttcacaaagcgtctgtacttcctcttccatgacttctccggcctgatatttttcatacaaaaaacggcctattgcaagcagatctgcatcatttccacgttccaatgtacgaatctgcccttttaagcgctgtatttccatcatttctccagctttacttgtcactgtttctgttgtctcaccgattttcttacctaagtcctcaaaaaaagaattcatctttcttctcctttctgtcatccgtctgttgtcttcaacagaatttatcctgcatatatacattataccccaaaccggcataacttcaaccggatttcttctgttttccaattgctgttctgcaaaaaaagaaacacacatatactgtgaaaaaacgatggagatcatacaatgccttactccgaatcctgccgggaaaaaattctctcagaagactatcgagattttattgtttctgatatccggatgccttttctgcaagatctgctggatcaggactactgtttccagtcccccggctttttttatcagtgtgcctatcttcccggatcccgtgttgatccgatatcccttgaaaaatattcttatttttcaattccaaaatgttattctctgctcagtatgcaggctttaaaccaggccggaatcctgcctcttcagaaccattccacactccagttaagcggaaaacaggttatgatcggctttttggacactggtattgattatcaaaatccggtctttcaaaacctggataaaacaacgcggatcgccggtatctgggatcagaccatccagagtggtacgccccccgaaacctttgactatggctcccactacacaggcgatatgatcaatgctgctcttgccaccgaaaatccgcttgctcttgttccgacggttgatgaagacggacacggaacatttctggcgagtattgctgccggttctggaaatccggaagcacagttcatcggagcagcaccggaagctgtcattgcagttgtgaaattaaaacaggcaaaacaataccttcgaaattattattttatcccggagtctgcttatgctgtccaggaaacagatattatgcttggtatgcgctatctgcacctgctcgccctgaaaatgaaactgcccctgatcttctgctttgcccttggcagtaatctgggcggtcactctggctctcttcctctttccatcactgcacagcaatataccctgctgtccaaccggattcctgtgatcggcgtcggcaatgaagcagatcagaggcaccattttttcagtgagatcatgaactcttccgacaccaaaactgtggaaatacgggtcggagaaaatacttccggatttatgatggagctttggacagaacttcccaatattctttccatcagtctgacctcaccttccggggagagtacctcacgcattcccatacgggccggaacaagcaccacctttcattttctgtttgaaaatacaactgtcaacatcgattatcgcctgtttgtcgaaagcacaacctcagaactgatccactttcgattttccaatgctgctcccggaatatggaaactggtcgtagaaccaattcagatcattgatggacgtttccatatatggcttccgatgcagaacctgcttagcggagatgtttactttttaaactccaacccctattacaccctgactgccccttctgactccatcgaacccatttccgtttcctactatgattcttccaacaacagtatcgcactttcttccggacggggttttacaagaacagaacaagtgaagcctgacttcactgccccgggaatcggcattaccggggctcttccgggcggccgttttgaaagccgaagcggttccagcacttctgcggccattactgccggagcagctgccctgcttgtagagtggcatctgcagcagaaaaaaatcgcttcggtagacacatctctaatcaaaagccttctcatgcttggcgctaccaaaacacctgacaaaaattatccaaaccgggaatggggatacggacagctgaatctgtacaatacttttgaagccatgcggcagttgtaagtccgtcaaaaactgtacaaaaaggggacgcgaatgcgtccctgaaaaattattccctcttttttgtttcataaatcgtcttcacgcgctcggaatccggaacaagctgttccggcacaggagcggttcccggtgcaaacaccactttcaataaaaccggtgtgacgatcgttgtgatcacaaccacaataatgatcggtcctaaaaatgcagacccgagcagaccaagtgccgctcctttgctggctacgatcagcgcaacctctccacgcgagatcatcccgataccgattcgctttgcctgataattcttataatggcagatctttgctccaagtccgcagcccacaaccttggtcagtactgcaacgatcgtcagtaccactgcaaagccaatgatcgctgctgacatctccggcagttccaccttcaaaccgatacttgcaaagaataccggtgacaacagcaaatacgataacgtatcaaattttgtttccagataggtcgatctttgtacgttggaaacaatcagacctgcaataaatgctcctgtaatatctgcaactccaaacacatcttccgctatatatgccatcagcaaacagaatacaaatgccacaatggtgtgacgatgtttttctttgtttgccttgtctacccagttcttatacagcttgtaaaaaataaatcctaccactccggcaaatacaaagaatccaacgatcttgagcatgaccataccaatcttcacactcggatctgaaatacttgtgacgatcgtcaatgctacaattcccagaatatcatcaatgatagctgctccaagaatcgcatttcccgaacgggttttgagttttccaagctcttttaatgtctctacggtgatgctgactgacgtcgctgtcaaaatcactccgataaagatattctgcaaaaaaatacttcctgatgcatccgattcaatcattcccggacgattgaagaaatatgccgtagcaaatcctcctgcaagtggtacgatcactccacacaatgcaatgataaaggacgcttttccgcttgctttaagctctttgatgtcagtctccatacctgcacaaaacatcaaaacgatcacaccaatctccgctaccgactgaagaaatgatgtctctgtcagaatgccgactccggcaggtcccaacagtaatccggccagaagcgcgccaacgacctgcggcatctgtacccttcttgtcaaaagccccagtgcttttgtacaaagtaaaataattgcgagatccagtaaatacttgtagtccataatatgccccctttttttgtcaaacatttataagaatacacccggaatgactttttttcaatatatttttcatacctttttcgacattttaacacccgtatccacataccactgttgaaaagaaatcccgccaaaaaaagagagtctgaaaaacagactctcctgtagatattcctatgacaatctcgggacttcttgtccacgaagactgatcagaggacctcctgtcccctcgatatatgcttttgtgatcgttacttctccaatgttctcatcttttggaatctcatacataatatccagcataaattcctcgatgatcgcacgcagtgctctggctccggtctctttcttcattgccttttctgcgattgcctccagtgcaccatcgtcaaactccaatttgacttcatccagtgcaagcagcttctgatattgttttaaaatcgcattctttggttcttttaaaatcttgacatacatatccttgtccagacccttgagtgtaaagatgatcggaagacgaccgataaattccgggatcatgccgaaattgcgcaaatcttccactgtcactttggaaaggatatctttatctttctcaaacttatctttcaattctgcattaaatcccatagaagtcttgtgcatcaggcgctccttgatgatttcttccaaatccgggaaagctcctccgcagataaacaggatgttctttgtgttcaccgtagtcagtggtaccatcgcattcttactgttcgcacctaccggaacctctacctcactgccttccaacagtttcagcaatccctgctgtacagactctccactcacatctctctgactggaatttctctttttcgcaatcttatcgatctcatctataaatatgatgccctgttccgccttctctacatcgttatccgcagccgccagaagtttggataccacgctttcaatatcatcgcctatatatcctgcttctgtcagagatgtggcatctgtaattgcaagcggcacatccagaagtttcgccagcgtcttgacaagataagtcttaccacttccggtcggtccgatcatcagcatattggacttctcgatctcaatatcatccatggaatccgttgcaactctcttgtaatgattgtaaacggcaaccgccattgccttctttgcatactcctgtcctacaacatactcatccagcttgcctttgatcttatgcggagccggaatatttttaatatccagcttgtggaactcttttggtttttcttttttcttcttgatcttttgtgccttcggaggagccatattttccagatccgacagattcaaaaactgtactcccggcatattcatcagcctgctgtaatcaatagaaccattggtcatcgcatcaaagctcttttgcatacaatccggacatacggtgatatgattcggcagatcgatcatctttcctgtcacgctctccggccgatggcatataaaacaaattttttcatactcatcctcgtgtttctcttttgcagacactccggatacttctttcttctctgcatcctcagtctctttgacttcttcagcagccggagtctctttttcttcatctatgataataaaatcgttatctgacatgtcttttcccttctttccagttcactttccctttgtacattcaccgagggtatgtccacattataatacagaacgcctgcagttacaaattaactttttctaaaccgcgcctgtttccagcatttccagaaactgtacctctgaaataattggaattccaagctctctcgcctttttattcttggaagaagtggagtccacatcattgttgatcagataatttgttttcccggtcacacttccggtcacttttccgcctctggcttcgattatttcttttacttcccggcgatttgcaaaatgttccacacttccggtaatcacaaaattcatagattcaaaaatctgtgccgtccaagttccttcttctggctggatctgcacttcttccagcagtcgtttgagaagatctctgtgtgcttcctttgcaaagtagtccacaaatgttctggcgatcacttcgcccactccctggatatctgtcagttcctctacagttgcccgcatcattttctccggatcattttcaaatgcccgacagatcatttttgcattggacagtccaatattcgagatcccaagactgtaaatcaatttcggcatggttgtatttcttgagttttccacactggtgatcagttttgtataggatttttccccaaatccctccaatgttttgatcgtttcctcatatctgtccagatgatagatatccgtgaaatcccgaataaatccttctccgataaatttttccagagttgcctctgaaagtccttcaatattcatggcatctctgctgacaaacagcgcaaatgatttcagatgttttgcctgacagtccggattcgtacaatacaatgtctttgtttcattttccatcttgatttttgttgctccgccgcataccggacaaacttttggaatatctttcacaccgcttcttgtcagattctctgcaatctgcggaatgatcatattcgccttatatacctggatctgatcgcccactcccagcgcaagctcttccataatactgatattgtgcacgcttgccctgcttaccgtagttccttccaactccaccggctcaaaaatagcaaccggattgatcagccctgttcttgacggactccactcaatttccagaagtgtcgtctctcgaacctcatctgcccatttgaacgcatacgaatcacgcggaaactttgcagttgttccaagagactgcccataagcaatatcatcatataccagcaccaggccatctgacggaaaatcattgttcacgatctgttcagagaaccatgtgacttctccttccacagatgcacggtcagtcaaatgatgttccactacctcaaatccctgtctttccagccattgcagctggaacattctggaattatgaaactccaccccatctgcttttacaagtgtaaatgcaaaaaacttcacatttcttcctgctgtgatctcattattcagctgacgcacagaaccactgcacagattccgtggatttttatatctggcatccacatcttcaatctgctcgttgatgcgctcaaaatcttggtagccgatcactgcctctccgcgcaggatcagctctccctgataggaaatatgaagcggaagattccgaaacacctttgcattgttggtgatcacttctccaacttctccgtttcctcttgtaaccgctttttgaagctgaccgtcccgataagtcagaacaattgtcagtccatccattttccaggagatcactgccttttgtccccctaaaaacgatttcagctgttctacatcttttgtcttatccagggaaagcatcggtttttcatgccgttctttcggcagctcactgagtacctcatatcccacattaaccgtaggactggatgcaagagtcgttcccagctcccgctccagtccttccagttcctcatataatctgtcatactcgtaattgctcatgatctccgtgtcttcttgttcatatgcacgtctggcacggttcaaaagctctacgagttcctgcattcttttcttttttgcttccattttttgagttcctttacctttatattaccgtctcattggaggaatccttgatctgatcatacaattcattcaactctgcatccgtcagctttctgtattccccttctttcagattccccagatgaatgttcatgatccgaacccggatcagctccttcacctgatatccaagtgcttcgcacatccttcggatctgccgattcagcccttgtgtcagaacaatggaaaatgtatattttccgattttttctattttacacggacgtgttaccgtatccaaaatcgggacgccagatgccattttctccaggaattcttttgtgatctctttgtctaccgtcactttatattctttctcatgccggtttccggcacgcatcatcttattgatgatatcaccattgtttgtcatcaaaaggagcccttttgagtccttatccaggcggcctacatacgtgatccggatcgggtaattcaaaaaccgtacaatactgtttcgttctctgcgttcttctgtacagacgattcctgccggcttgtttacagccagcacaaccatttcatcctgtttggagacgatttttttccccactttgactacttgtccaggaatgatcttcattccggtctgcgcccgttttccatccacagtcacacggccactctcgatcagtctgtctgcttccctgcgggaacacactccggcttcgcttaaatatttattcagacgaatttcctcttttgtcttctgatattcctgaaagatccgattattcactgcttaataccccgcttatgttattatcctgcaaaaatatattggcgctgtataaaaataatgtatccgtaatctcatatgtatccataatatccccgatcgtaccggaataataccttggatctaccattacaatctctcgaaaatacggtgtcaaaaatggaacaaatgaattcgcataggaatctttaaacagaagcagtctccgattgctttcagacactgtgcgaatatctacaacagaaaaattaccacccagatagactgcatatttatcacgttctttcagcttggaggaatcatacaaagatgtcgtttttttctgttcatctacataattgaccacaacatcattgtcttctgcctttggcacatagatgtcaatctgttccttttctttcagatgacatccactctttgatgccaaagcaccgttgaactctgttgtgatcggataagagacatatcccccggccattttttcatccagttccaatgttttgacggattcctgaaagacataatatgccccttttgccgtccagtggtgatctgttttataataaatcttctcatcactgtgcctcgtcaggggcttcacagcatcaatccactgcacactgtccccaagttccttttttacctgtgcaatatactgactctggtcagcaactgtcgccgtaaatggcattctgtcttccaatacatatgccgcatccggcaccagaatcatatttaccggaatgtccgggtatgtttcgctaagattttggatggcttttaaattgtcttttagcacgtcctgatccggaactgcaatatcttccagcagttgtcccttttttccaataaaaacaccattttcttctttgcttcccgccagccttgaaaatcctactttcaggcttctccaggcatttcttcctacgaactgatcagcctgatatttttcatactgatccatatagcttcctgaagtaaccgaactgacggagaactccggcttctgctgcagtccccgattttcctcttctgaaattttcttggacggaatgatcagattgagaagcccgattcccaatatgcaaatcagaaatcctgctccgatcactgcttcgattcttcttttccttgtttttcttctttctgacatatgaccacctaaaatctaaagtataaaaacggattgaatgactgcgtcaccagaaatgccagtgaaagtgcaaacatcacaacatacatcacgcccgtcacagtatattttcctatcctgctgcccggagttctctggatgttccgcatcaatttgtatcctgccggggaagaccccagcactgcaagcagatagatcaaccagttggaaaggatataaaaccatcccagctgatccataaatccactggcaccaattccaaacatcacacctacatattttaaagcataaccaagagatgggctgaagaataatacccagccgatcagcaccagtaccattgcataaatatgtcgtactgcattcggccatttttcaacataccgtccccacacaaatttttccagaatcaggatgattccgtaatagaatccccaggccagaaaattccatgctgcgccatgccataatcctgtcagcatccagacgatcaaaagattcaaaatcgttctggaatccccttttctgtttcctcccaaaggaatatacacatactcacggaaccacgtgctcaaagaaatatgccatcttctccagaactctgtcacactggctgctacatacggataatggaaattctccagaaactcaaaaccaaacattttcccaagaccgatcgccatatctgaataaccgccaaaatcaaagtatatctgaaatgcataagaaatgcacccgatccatgcggtcatcacagaataacttcccagatgcatggctgcaatctgttcaaaaactgccccggttgtattggcaaggatgactttttttgcaagtccccgcataaaaaacatcgctccctgtccaaacttggtcagattcatggttctgtgatccagctgttcttcaatatctacataccgcacgatcggacctgcgatcaactgcggaaacatcgaaatataaagtgcaaaatacagtaattttttctgtggtcttacttcgccccgataaacatcaatgatataggaaagtgcctgaaatgtataaaaagaaatcccaatcggaagcggcagctctctatatggaatttcaaacggaagtaccgcattcaccgattccatcataaaaccataatatttaaaaaatccgagaagcagaagatttgccacaaccgcaaagatcaggctgtttttcttcttcttttcatcttctgatttttctgcaatatccagtccgcatacataattcagacaaatggataagatcatcaagatgacgtaaaccggctctccccatgcataaaagaaaagacttgcgatcagcatgactatattcttaaaccgatatggcacaagaaaatatactgccaatacaatcggcagaaatacaaataaaaatgttatactgctaaacagcatcctttattccccctacgcttctataaactttttgaaaagacagatttatacgtctctgctttgggcgaaactgcataaaatacaaatttccccctgacagaaatctgagcttcttctaaaagctgcacttcttttggtgcatacccctcaaaatcatttttcctgtttgcacggcgctgttccacagctgctttcacttcctccgcctgttcatttgactttgcctttaccagtaaaatctcctgcgcagacatactggattctgctgtatagagcatcacaccgtcataatctgcaccgttgagaccataatatctcttcagtccctgcactcctgcctttttcatatgctccgtatccagagatgcctctactttttttgctacagctgaaaaacttttggtacttccgcttgtaaaaattaaaagtatcgccacatacacaacaatcgcagctgccagtgcgtatttgatccatgttgttcttccaagattttttatcttatcgatcataaagctgctccctccgccatgcgtctcagccagattggataaaactctgccttgaagtgaatcccatcctcttcgtaataagtctctgacaccagtcctgtgttgtccaaaaatgccaattgcttttcatcacacattttctgaagtgcggcattgtattccggaatcttctggaacaacggatcctctgcctgctttgcagcactgaccggaaaaatcgaattcacatacagcgtcgcatccggcaactttttgcgaagctgatcaacgactgcgctgtactgttgtataaatgtatccgtatccccgttagttgccaccagatcattcattccatacgacagaaaaaccatctgcggcgcaatattggctgctgtctgaatctgatcctccagttcatccagctcaaccccgatcttggcaaccacactggaagcattcaaaagatcatattctacaaagccttcggaaatggaatctcccatcacgactgcgctggaaaataaacttttataattaacattcccgcttgccgtttctcctgtctgcaatttatctttcatttccaacttactgatcttcttttcaatatcttttacattttcttcttctgctgcctttatgatcgcaactccctcttttgtatctactttttcacttgaaaaataatgaattccttttgcgatcaaaatcactgcggcgacagccagaaatcccccaaatactatgatcaaaaatttctttttctgtctcttcattcgtatcttttatccccttatccttaccttgttacctattttataatacgttttccctgcttaaaagtcaatgttcccttcggatgtttccgcagtttttatgcgctgctgacagtcaccctccctatggcagatccgctcactgatctcctgcattttcatatcaatctcatgaagctgttctgcacaggttccaagatcttctgatactgaatccggaaattcatccgtcttttttttgtaatacagcttatgttctatacttgcccagaagtccattgcaatcgtccgcatctgcacttctaccttcatcggctttttctcattcataaaaaatacaggtacttccaggatcaaatgtagacttctgtacccgtttggttttggatttctgatataatctttcttttcaataagacggatatcatcctgtctgcagattttctctgcaagtgtataaatatctttcgggaaacaacaaatgatccggatccctgcaatgtcatacaagttgtcttctatattctgtaccgtgatctcaatgttttttctcttcattttttccaaaatactcacaggtctttttatcctgctctcaatggataaaatcggattctgatctgaatgaattgacaactcatgattcagcacttcaaattttgtcttcacttccaacagcgcacattgatactgcatgatcaatttctgaaatggcactgccgattccaggattccctccaactcttttaattttaccaattcatcaaatgtcatttcttccatttttcttcaccttttcttctgtactaatcccatataaaataatatccagcaattctgaaattttcaaatcatgttctcttatcaattctggagaattgcccagccaggagattttattctgataatatccattgtacatattttgaaataaacacaaatattcctctgccatctccatactgattccatctcttaaacgaatcttagaaagcagctgatgatattcctttctgatatacgcgtcatatcccgctgtcacattcaacagtttttctctcaaatgttctgccggatatagcattacattaaagaaaatatttcgatcatacggatttttttcgaaaaaagcttctcttctttccagaaagtttctgatctccacacttgctgtacttgcctcaatctctactttttccaaatatgccatcaatctctcgaaactttgctcgacgcagcataaatacaattcatctttattcttaaaattatgatagatcaatccttttgcaatgtgatatttattgcatatgacattgagtgaaactgcatcataaggtttgcttccgaactcaatcgtagcggcatatatgattttttcacaagtctgttttgtcttctcttctttcttcatgacagcgtcctttcttgactgtttagtctataacaggatactataaaatccctttacaatcaacctctttgtctgggctttttttcttttttatggtatgataaatggacaaatatttgtacttttattttaggaggctatccttatgatcgcattcaaactgacacctgtcaaatcatgtatgtcacaccttcttctgacagaaacttttgattcatttctgttgatcgaaggtgagatcacgacatttaatacatttaaaattgatggttttatccagaaaaatttttatacttcggaagagttggaacaaatgggtcctctccctgaatacgcttattggaaacagctgcgcgaatattgcttttctctgatcaaggggaagaaaacgccgctcggattccgttttgtattcagcctttccccgaaaaatattgcccgcctcatcgaacaacatgaacttggactcaacgcagacgatatccagggactctatctgaatcttcgatatgattccaccggacttcaatgtgtcaccggcacctctttcaagtcattttccatggacaaatcgttggaacatgcctgggatgagatgatacaaaaatttttccagaaaaaaggaattgattttgaaattttaacctgacatattttattatacaggacagagaagagatttcctcttaaaaatagtgaaattttttcttaagattacaaagaccctgacggatccactgaaatccgcagggtcttttcctttttattctatttcgtcaaaagcatcatgatctgattgcttctctgtacaaatgctgtcatctcttgtggactcaatggtttgtgggcaagcagtgccagatcatagagctgcttgcagatcagttctacattttcgccttctttgtgttctaccacatacttcaccagtggatgttttgcattcaggatcagggaagcctgtccgccaaacataccggtatccataccacccattccatacatcttcatcatctcttccatacgtctggactcttcagacaacacggccatggaagcaatattctcatcttttaatttttctactttgacatccagtttctcattattcagcacttttctgaagatttctgtcagactgtccgcattcttctggaatgcttctttttcttcctcttccacttctgctttcagggattcatggacatctgcatcgatccgctggaattttatattgtcatgcttctgctccagatatgtgataaacgcagaatcaatgttatgtgtcaggatcactgcatcctgtccctgttctttgaacatattgatatactggctttgctgctgctcattcgtgacatagaaaatgtttgtcttcggtgtctctttcggctcctcagaatccgttgtctcttctgtctttgcctcttcttgtacctctccgccgtttgccttgatgcagtcttccaatgtgagatatttgtgttccagattcttaaacagcatagaatctttcactttttctccaaatttctcgtctttcagacatccaaatttaatgaacgggctgatatcatcccagtatttctcgtagttttctctgtcagtcttgaacatgccattcagtttatctgccactttcttggaaatgtaatctgcaacctttgtcacaaatccatcattctgcagtgcacttctcgatacattcaacggcagatccggacagtcgatcactccttttaataccatcaaaaattccggaatcacttccttaatgttgtctgcaataaatacctggttgttatacagcttgatctttccttcgatcgaatcatattctgtgttgatcttcgggaaatataaaattcctttcagattgaacggatagtccatattcaagtggatccagaacagtggttctttataatccataaatacttttctgtaaaactcgatgtaatcctcttttgaacattcacttggattctttgtccagagcggatgaatgtcactcaaagagaccggacgttttacaatttttgctttgtgctttgtctcgccttcttcgccttcttttggttcttctgtgatatgctctaccacttcatccgtatccagaacatctgcctcatcgatcgtctcatactccggctccgcattcgctttggaaaggaaaatctctaccggcatgaaagaacagtatttttccagtacttctcttgcacgatattcatttgcaaatgcaaggctgtcctcattcagatacaatgtgatctctgttcctacttctgtacgattgccttcctgcatctcatactctgtgccgccttcacttacccagtgtactgaagctgctccttctttataagacaatgtatcaatatgcacctcatctgctaccataaatgcggaatagaagcccagaccaaagtgaccgatcatctcatcttctgtcgtcttatctttatatttttccaaaaactgggtcgcaccggaaaatgcgatctgtgtaatatactcttctacttcttctgctgtcataccgataccattatcgataaatttcaacgtcttctcttccggattgacgatcacctggatcttacctttataatcatcgggaagctcgcactcacccatcatatccagctttttatattttgtgatcgcatcacatccattggacaccaattcacgcatgaaaatgtcatgatcggaatatacccactttttaatgatcggaaatatattctcgctgtcgatagataaattacctttttttgttcccatatctaaacactcctctttcttttgaaatcatccatcttcggattttcacttgtctatggagtattttagtacaccaggttttaaaagtcaacataaaattagcactcttttcagttgagtgctaataaaattatgaactctataaactttttataaaaagaaacagatgtcaaatgttctggtcaggtgtataatctgttatatccacttatttatgatttcaaaggaggttttcaaaatgaaagatacatttttactgaacccggtccatacagatcaacagcttcaggagattgctgaccttgcttctgtgatctggcacgaacacttcactcctatcatcggcgtaccacaagtcgagtacatgttggaaaagttccagtctttttctgcactgaaatcacagatcgaatccgggtatgaatattttcagatttttgacaatgcagaattctgcgggtattgcggagtccatcccgaagagaacaaactgtttctaagcaagctctatattaaaaaagaggcgcgaaaccgacacctctctacgaaaactctgcaatctttaaaagcactctgtcaaaaacgcggtcttatctccatctggcttacatgcaacaaatataacgccaacacgcttgcagtctaccaccatcttggttttaaaacgatccgttctcaggtagcggatattgggaatggatatgtcatggatgattatatcctggaatgcagagtctgatcatgctctgcatttttcatccgaatcaggatccacatttcaaaaatacctactcctgccactgcaagcattaccaaatccataaaaatccggtgtttctttaccagagatgacaccaccagttctccttcgactgcattttgcttgataaagagcacctttccattgttcgtatgcggcagatatttcacttcgatcaccgcataccgcggcaccgcttcttctacaacgtgtacacacacttcacgccctgtataatgatcctgaactgcaatatcccgaatcttttgtttctccggatttttgatatcctctcctgtcacgatacctgttaccacttcatatctctcatccacaatacgcggaaagtccagcagagccggtacaacgaaggtaatccatgccgctgcaagcacgataaatacaaccctgtccgcccttgcagcgactttttttctttcccgtacattttcattgtttgaaaccacccgggggaccttttcccggatatgctgaaaatacatcagcgatagaaagactacaaacaccgcccgcagaattgtctgtatgtgcagtctgagcatttcccctttcctctctttctctgttttctcttttgtctattctctgtaaatttccccataatctgtagatccaatggtcatacttggttcaagcgtaacagccgcccctgtcgtctgtatcactgtcccttttggaatcggcacattcgcataactgatttccagttcattcggcgcaaacgaaatcgcctcgattctgccttctccaccttcttcgtactctgctaaaaatgaatcaggaaatccattcatcaattattttataatttttattataacaagagacattttgcctgtcaaagcaaaaacaggaaatcccatggtctgatatgttcacatggtcattcctgtttttcgtttctatttgctttttacaatttccagtgctttttggagttggttatcatatgacggattttcttcatcatatgcatattcaatttccacatccggccgaattccctttttgtggatattctcaccactcggtgtaaaatactctgctgttgtaaccttcagcatcgtgccgtcatcaaaactgaataagtcctgtacaattccttttccatacgttgtcgttcccacaagagttccaagcccatgatctttcactgcacctgcaaaaatttctgctgcacttgcacttgctccatttaccagcaccgccagtggcttacggaattcatgctttccatcacagtcgtatacatcttcctttccgtatttgtcttttatggaaacaattcttccttccggaaggatctgtctgagcatttcaacaacggtatccagattgcctcccgggttgttgcgaagatcgatcacaagaccctgcattccctgactttccaacgtttccaacgcggatttaaactgttcataagtcacattttcaaattcctgtatcctgatataaccaatgttttcttctttttgctcatactccactgtctgtgtctgaatctttgccctgacagccgtcaaggtatgcgatttgcgctcttctccacgataaacgtaaagttctacttctgatccttcttctcctttgatccaggatacgatttctgacaaatcctgatcctgtatcttgtgatcatccacctggtacaaaacatctccggtaaggagtcccgcttcttctgcaggactgtcttgatacacattcgtaaccgtaatctctccggtctgcagattctgtgtcatcccggctccgattccgaaatattcccctgtagtgctttcccggatttcttttgtctcttcttcattataatacactgtatacgggtcattgagtgcactcagaaaaccgtcatacacagcctcttccaactcttcttcttttacctcatcactatagagataatacgtatcaatcattttctggatgtttttaaattttgcttttgtctttttctctgcctgttcctgcttcgctgtcaccgtctcatctgacaaaaacaatcctgtaaattccggcaattttgtgtaaaaaccaactgccaggaacataagaagggcgcctgtaagcgccccttttataaaacttcgatgtctgttcatactctgctaccaactttcggtaatttagaaatactgatccgggcttactgcaactccattcatttctacctggaaatgcagatgtggacctgtagactgtcctgtagaaccaactgcaccaatctgctgtcctcgctgcacatactgtcccgcactcacacagatgctgctgtggtgcatatacttggtcaccagaccatttccgtggtcaatgactacccagttgccggcactgctgctgtaaccggcgatgatcacgcgtccggctgccgctgcatatgtaggagttcctgtaggagccgcataatcatttcccttatgtccacccacttcaaattcccggatctctccaaaataactggactgataactcattcccggacatgggtgtgtgaaatatccattcccgctggatacatttccggatgacggaggcgtcactgcggaaccaccggaacttcctcctgcattcgtggagttgttctgattttgctgttgctgaagctgctgctgtcttgcagcctctgccgcctcttcctgacgtctcttttcttcctgtaccagcttctgaagggtctccatcttacttccaagctgacttcccaaatctgccagctgaatgtctttttctttcaggaggttctgtgcctgcgcctgctgattaacaagattggtctgaagagtattcaattctgcatactctttttgcagagctgcctcctgctcttctactgcctttacagtcttctgaaattctttcagtttttctctatcatattccgataatttggaaatatactctgttttattcaaaaaatcactgatattctcactctccgcaagaacctcaataaactccatatttccattctcatacatgtatttgatgcggatcttcatactctgatactgcgagttttcttctacttttgcctgtaccagatcttcttccgcctttgtgatctcggcttgttttgcatccagcttggactgtgttttttccatctcttccgcaatctttttcagttctgcttcaactgatgtcttttctgcctgcacactgtctttctgctgctgcagctggtctaccgctttctgtgcatcctgtaccgtctcggcatgtaccggaagtaccattccggcagaaagcactgctgtcagacacaaagccgtcactcttttcatgcgttctttcatgtgctcacctatactttcaaatgcttgcgtactgtaaagaaacttcccaaaaatccgatgccgactccaagcagaagtccgattggaagcaggtaacgatacacatcacctaccggcaggaaagctacaatatttttcaagatactaaacttcgtcatcacatatcccactgcttttccataaagtgcatataacaaagcaagcggaagtactgctccgacaattccgatgatcagaccttccaacacgaacggggaacgtacgacaaagtcttttgcaccgatgtatttcatgattgcaatttcttctttacgaaccgtgatacccattgttaccgtattgctgatcaggaaaattgaaactccaaacaggatcagaatgatcgcaacagacacgtatccaaccaacacattgacactggaaagtgtattcgccacaacatctgacttatttacttttctgactccatccagtccctgtgcaaactttaccagttccttctgggttgtagaaagagacttgctttttgaaatcatactgctgtcgctgctgtcttcctgtggtttcatatataccgcataactgcttgatcccgcaagcggattatcatcacgaaatccttctgccaactctggattatctccaaaatactcttctttaaagctgtcccatgcatcgtcttctgaaacaaactctactttgagaacgtcttccctgcttctgagctcatctccaatattttcgatttgactgtctgtcgcatcttcatcaaagaataccgtgatcgccactccctcttctgcagtcttcacaaaatgctgcaaattcagcacgatcgaaaagaacagaccaaacagaaaaatacacgctgacatagtcgcaatggatgcgagagagaacattttatttctcccgatattcttaactccctgttttcctacgtatcctaaagtactaatcctcatctatatacccacctttttgttcatcactgacgatcacgccttgcttcatcgtaattactcgttcgttcatctcgtttacgatctcctggttgtgcgttacaacaagcacagttgtacctctgtcattggcctccttcaaaagactcatgatctcccacgaattggtaggatccaggttaccggtcggctcgtcggccaacaaaattgcaggctcattcacgattgctctggcaatcgctactctctgctgttctccaccggaaagttcctttggaaatgctttatatttttgtgccagtcccacaagagaaagtgccgccggcacttttcgtttgatcactcttgtcggtgtctctgtcacacgaagtgcaaatgcaatattttcataaatattacggtcttttaataaacggaaatcctgaaaaacaactccgatccctcttctgtattttgcaatgttacgatgtttcatccgcttcaaattctgcccgtttacaatgatcgtgccttctgtcggttccagttccttcatgatcagacggatcagtgtggattttccagaaccactgtctcctacgataaaaacgaactctccctgttcgatcttaacagacacaccgttcaacgcagcattccctttggaatactccttcgttacatctcttaattcaatcatcctactcctcctgattatcgatacattatcggacgctagtccgcccgccgcaggcatgcattacgggatgcccggatgggtatacattatcggacgtcagtccgcccgccgcttaatattccagtgtctccatatatttcatatattttacgaccatcaatgcaatcttaaatgtgatcgcatcttcgaatacacgcagatccagcccggtacttttctgcagcttatccagtctgtatacaagtgtatttctgtgaatataaagctgtctggatgtctctgatacattgagactgttctcaaagaacttattgatcgtagtcaatgtctcttcatcaaattcatccggtgatttcccctcaaaaatttctttgataaacatcttgcacagcggaattggaagctgatagatcagacgtccgattccaagtgtactgtatgccacaatatctttctcatcaaagaagatcttgccgacatccagtgccagttttgcttctttgtaggacttggaaacttccttgatgtcattcacaatggttccataagcgatatggatcttgtcatcctcagactctgcccgaagaatctccatcatctcttttgccatcttttcaagttctctgcttccgtctttgtccgccagctctttgacaacaatgatattcttctcatctactgctgttacaaagtctcttgactttccgccaagcagatttctgacattatccaaagcaacactgtctttttcatgcgatgtctcaataataaagataacacgttttgcttctgtgtcaatatgtaatttttttgcacgattgtaaatatctacaagaagcaggttatccaaaaggagatttttaatgaaattatccttatcaaaacgctccttatatgctaccagaagactctggatctgaaatgccgcgatcttgcccagcatatacacatcttcactgtctccccctgccaacaaaacatactccagctgctgttcatcaaaaattttgaagaactggcagccctgaatcacctgactgtctgccggtgattctacaaatgacagtactgcgccctcataattccatgtatcatcaaatgttgtagcaagcgcctttccttctgtgtccagaacacaaaaatctattctggaaattccttttaatccttcgatcgtgttttgaagtatctgatttgaaatcatacttttttcctccgcctatctactcgtttccatgtgcatatttcacaatttttttactctcttagattggtctgcacaacccatattttatatattaaggcaaaacaccaaaaaaagaaagaggaaatccactttttttatgcatttcctcatagtttttacaaaaaattcatatttatccaactatacatagtatacaaattcactcattctgctcttcgtttctctgctgtctttctacttgatagcgaaatacttttttccgcagaaatctctgaaactttccttttttctgttttttcatatagatttctttcaaaacacttccacatccgaaccagattctggcatttagcagggcgctgtgcttctgtatgagcagctcctgttccggggaaggaagcagcgaaaaaatacaatccgtctcaacaccgttgactgcattgatcacctgttcaattccggtaccatccggcggcagaaccccttttccaaccaggatcagtttcctgtcatgttctcgaatcgcagattccatctccatcaattccgtttccgactgcgctacaagaaatactctttttttgtttctctgcaggtaacggagaaacatctttaaaaatacctgacctgccgtgtcacgaagcagtgtcttctcccgaatcccggctgcctccagaatctctgtctctcccggcagaaccagattcagcgactccaccgcttccttccatcccggcatgtcttttcctcgaagcaacatatccattgtgatgatatctactgtattaatagaagcactttccatatactgcacaaccttctgcatcgctgccttggcactcgtctgttggatctctatattcaagatattgatcttctcattcatctgtctcacctgtacttttcttcccagtcgtaaaattgtaccaaaaacgagaagatttgtaaagtattttattctatctgacgatacttcacacgacactcctacattgattccactgcggcacgctcaatagaaagccccttggtatatcgttccataaaacgtcgataccctttgactccctcttcttccggctcaagaacagcaatattgctgtctttaaatacaacttcttccagatattgatccagtgtcctctcatttttttctatcataaatgcagccagaagtgcgattccccaggccccgccttctcctgctgtctccatcactgctaccggaatctccatggcatctgccatgatttgctgtccaacccctttggttttgaacaatccgccgtgtcccatgatccggtctgactgcacaccttcttcactctttaaaatgtccattccggtcttcagtgctccaagtgcagtataaagattgactctcataaaattcgccagattaaatctggaatccggagtcctcacaaacatcggtcttccctcatcaaatcctgtgatatgttctcctgacaagtacccataagaaagcagtccgcctccatccggatctccttccattgctttcttataaagtgttccataaagctgattcatatctacatccatgtccatggtcttcagaaattctgcaaataacccaacccatgcattcagatccgatgtacagttattgcaatgaaccatggcaaccggatccccctgaggggttgttaccatatcaatctccctatgtaccttcttcagtccattctccagaacaagcatcgcaaatactgaagttccggcagaaacatttccggtccgcaccgtcacgctgttggtagcagtcataccggttcccgcatccccttccggtggacacatcgggattcctccttttaaggtaccggattcatccagcagttttgctccttcgtctgacaaagtgcctgctgcctctcctgcacataataccttcggaagaatctggctgatcttccatggatactgtttttccctgatcatttcatcaaattgtgcctgcattctctgatcgtaatcgtgaatggacgaatcgattgggaacatgcctgcagcatccccgattccgagtaccttctctcctgtcagtttccagtgaaggtatccgcttaaagttgtcatataccggatatcccccacatgttcctcctgatttaaaattgcctggtacagatgtgcaatactccacctctgcgggatattgtactgaaaaacatctgtcagctgatcggaagcttcctgcgtgatcgtatttctccaggtacgaaatggcaccaaaagttcttccttttcgtcaaatgccatatatccgtgcatcattgcactgatcccgattgcttttaccgtttccagtcccacaccataacgtgcagatatatcctctctcagactactgtagcaagacttgagccctttccaaatcatatccagatgataggtccagattccatcttcatactgattctcccagtcaaaacttccagatgcaatgggggtatggtctgttcctgtcaaaaccgctttgatccttgtggagccacattcaatccccagataagtctctccatttttaatctgctctgcatatttattattttccatctttttgcctcctgcctgaattttccttattaggatggtgaatctcatactgtttccactatataacactttcctcttaaatacaacttggcgtatttcctaaatataaccactcatttttggctaaaaaagcaagaagagactttgcattccgcaagaataccaagtctctttctgtaacgtttcattttgcattgaaccaaaaggcttatgaaggatttccatgctggcgtcttttggtcatcataccaccgatacgccctgtttcttttgaggacaatgacttccagccctcctccaggacctgatccaaaagccccagctcttctgcaatctcatatttcattctgtccttttcttccattgccggaatatcttcccgggtgatctttttctgcttcatattcagagcatctccttcctttttcaaaagtattgccccaaatattggatttcattcgcctatttctgatccggcatgatcactgctgcgataaaatatgccagaagtcctgttccgatactggcacagacaaacaaaaccattcccagacggatcaaaaccggatccacattgaaatattctgcaatacctccacacactccacacaacacacggttctcccttgaacgatataatcttttcggttccatattcttattctcctttcgcaaataaaatatcaactgttcccattccacattcggtatccgacggttctattatcagctctacataagaaagatccacatccaactctcgaatttctctcaaatcttctactcctgaacgcatttgagatatcccgtaatctttttccaacgaaagcagtccgtctcttccctgctcctgaagatcccggattcctccgagggcagtccccgtcactgacaagacaactccgacccctgcacagattccacaacagatcagtagaattttccacccttttttcatctatccagacaccacctttctgtgaaacggtttccggcacagttccacaacaaatcgaaacatcgccggatacatcaccatacaaagctttccggtaaacaacgtcgccaaaacgcccagtccgatcaatacaagtccgattcctcccatcaccattgcagccggtatggaatggattgcaatccctgtgccaattcccgccacagccactatagctccggcaaatacaactgccagagaagcgatcaccaatgccgcaaaaaagctcacggctgcgatcaacaggcctgccgctgcgcaaaaaagtccaactgccactggaatcacaaccggaaacacagccagagcgatcagtacgatcagcacgatctttagcgccttactcgtccttggctgcgaagtttcatatgaatcatagcccgactgcccatcctgataatgatacccctgtctttgtggaacttcttttcgcgaggtccatgtctcctcatatccattctccgtgaagaccccatcgcttccatcatgattcaaatcatgcttgatcgtagccgctacacgctgcggactttccagctcccgaatgacttctgcttcattctccgcacctgcatcttcaaaataatcttcataatactgcagtgcttctgctctctcatctgccggaatatcacccaataacttttttagtgttgtcataaattcttcccggttcatcccgtcacgcctccctcaaatatctcctggatctttctggaataattcttccactctacctgatacagatgtaactgtgccattcctttttccgtcactttataatatcgccggttcctcccatcaaactgccggtcatatacttccagacattcatctttctgaagccttctcagtaccggatacagcgtagattctgatacattcagcaccttgcgcacatcttgtgtgatcttgtagccataggtaccttcgctttcatgtgagacaactgccagtacgatcgcatctaaaagtgcagctcctgtattaaataccattttcctgctccttccatgttgttttcctctcaatactgttttcttgcttatattatattttgtataatatatgttgtcaatataatattatttaagattttctaaagaattctttctactatattaaaaagcggcagtcacctcagcgtgtgattctgccacttccgtttttatctttgccagatccagattccgatcccgatctgcagaagcaatatcagggggactcccagataaaacaaaggttttcttattttatggtgaaatccaaacattccagccagcgctccaacagatcctcccactgctgccagaaaaagcaacgttttttccgaaatcctccatcggccgttcactgccttccacttatcgatcccgaatgtcaaaaatgccgacacattgactgccagtaaatacacccatccatatttttccatttacactctgatttcctttccaagtgtgaaagaatagatgattttttctttcactgtctttccggtgatctgcgacagagcacgcgcataatagtcaagttgtgactgatatctttggatcagctcttccttcgttctcacacggtctgttttataatctaacacgacaagtccgtccggctcttcaaaatatacatcaatgattccctgcaccagaagttgttctcctgaggcacattttgtgtccggatacaattcttctgcatccacacccagcacaaaaggctgctctttataaagctgttttcgccttgctgcctgctgcatgcgcatcccgctttcacattggaaaaacgtcagaaaatcttccactttcactgattctgcggtctctgtactgattcttccttcttcctgaagtgttcttaacaatgtcttcaggctctcttttgtatattctttttcaaaatccaaaagctccagaaatttgtgatatgccgttcccctgacagctcctgttactgcttcttctcctaaaaatcgcggtacaagaggcgctgcttcttcttcctgatataagacctctcccgcttcttcttccagataagttcgttttttcagctctgaaacggtaaatttcatctgaaaacgctgttcctcttcaaattgatatacaaaatccagctgttttttcaattcctcccggtatcctgcatcatgtacctgatccatatcccagttttccaacacattacgggtaagtatatctgcttcttcctgagccctctccatctgtgccgcacccagactgtccaccactgaaattccgatcggactgtcttctggagccgctgcaggcagcagccagtccatatacgaatttgcagagagaatctgatagggaagaaatgctgacttcttcctgtcagcaagtccttctaatttttttcttgcatcagtacatgatccggttaaaatcagcttttcctttgctcttgtcatcgctacataaagcacccgcatctcttctcccagattttccactgcaacctgcttctgaatcacctttttcaacaatgtaggcgcttttgttctctttttcagatcaatgacatccattcccacacccagttccggatgaatgactatgctgccttttacatcctgtgtattgaatcgtttccccatgcccgccacgatcacgatcggaaattccagccccttgctcttatggatactcatgatccgaaccgtatctgcctgttcatctgccagattcgcctcgccataatctacattatattttttcagctgttcaatataacgcacaaaattaaacaatcccttgtagctcgttccttcatacgctgccgccttcgtgaccagcatctgcacatttgccatccgctgcgcaccgcccggcatcgcagatatatatacgccgtatccggtttcttctataatcttccacagcagatcatgcatggctgtatatggaagcatgtcccgaaacacggatacctgccgcaaaaacttctgaagcatttccttcagaagcggctctttctccacttcatcctctgaggcataggcatgaactgcctcataaaagaaagcacccggatatgcacttctgatttttgcaagttctctggcatttagccctgcaaatggtgaggtcagcactgccgtcaaaggcagatcctgtcgttcattgtccagaatctgcaagtaatccagaagaatactgacttcatacgtttcaaaatacccttccctgcttcccacataggcagagattccttcttctgccagaacctgcacaaacacatctgcccatcctttgatgctccttgtcagtattacaatatcttgatactgtaccggacggtatgcttttgtcttcttgtccaggacctgcccctgtaaaagcagcagcttaatccgatctgccacggcttttgcctccagacggcgaatatgctcttcttcatccagttcctgcggatcgatcagcaaaagctccgcccgatttgccgatctgttgttttgcaccctgctctttggataatctgcaccaggataaagagccgcacgctcatcgtattccacacctcccacacttttgtgcataatctgttcaaacacatagtttgcagcatccagaacctcttcgcggcttctgaaattccgatccagatcgatccgctgggtttcactgtcctgctgggtgtacgtatcatatttttccataaacagctccggtctggacaggcggaaccgatagatactctgtttgacgtctcctaccataaaaatattatattttccacgactcactgttgacacactggtcaaaatggcctcctggatcagattgctgtcctgatactcatcgatcatgacctcttcaaactgttcctgatactctctggctgccgcagaaggcaccagaatcccgtctttttcttctgtcagaatcttcagcgcaaactgctccatatcctgaaaatcgatcacattgcggcttctctttttctccgcgaacagccttgcaaaagttgtgacaagacgcaccagttcttccatcgtactgctcgtgtcctgcagatcctttgcgagcgcctccacgttttcataaaaataagtctcctgcagatcttttatcatcttttttgctttttcccgcaatcgctttactgcttctttcttctccgggtcaatggtatcatcttttttggcagaaagtcgtttccatgctgcctgaccgacacttgcataaagctgtgagaaggtcgtcgctttttccatggatctgatcatctccagatcagcttccagggcctctgcatacagatacggtccgtccggttcttcacagagtttcattccttcttccaaaagagctctcactcccagcagtgtctgtcggattccttctattaagagccgaacaaacgcaacttcagaaaactccttttcttccacctggtaattgttcacacatgtatgcagccatttttccggctgagggtaactgcctgcgtattcatacaactgcaggatcacttcctcgagctgcttatcacttttcccagtagaaaacttctccgcaaactctaaaaacgactcttccccctgagcataacaagattccagcatttcctccaacacatcctgacgcagcagtttcagctctccttcctctgcaattcgaaatcccggatccagatcaatgacatgaaaatgctcccggatcacagacagacagaagctgtgtattgttgtaatacgagcactgtgaatcagtgttgcctgcctctgtaaatgcacattttccggtgtgtcttccaacgcagtttcaatggcgtcgcggatccgctctttcatctcagcggctgctgcttctgtaaaggtcacgatcagaagccggtctacatccagcggatctttctcatccagcagtctctgaatgatccgctctaccagaaccgcagtttttccggaaccggcggcagcagaaaccagaatatttctttttcttaattcaatcacttttttctgctcttgtgtccactgtacactcataatggctcctccctgtcctcgatttcttcttgcatcttgaggattactgtttcttttgagtacgattccagactccgatactcacagccttccagccttggatcaaatccacagatatcccgatatgcacagtaatcacatcctgtgctgccatttaactcatacggctttgcagctgcttctcctgcatagatctgtcgttttatctgtgcttccttctttttggtataggaaagcatggccgcaaatgcctccggtggaagtactttggaatatcgattcagacttccatctttattctttccaatcggattgagtactgatgttcctaaaagctgatgctccagatgttcgatcacttcctcttttgcattgatcattccatccagccggagttcttttaaaattttttcttctactatatgttcgtcattttctctgtccacaaggggatcctgaatccgatagtaaaaaatccctgccggttccacactctttcccgatgcacgccttttctccagatccaatgccgcatttaaatacaccggaagctgcatctgcagtccatgatacagcgccacaatatcaaagctcttccttccggtcttatagtccgttacctttacatagacaacatcctcatcctggcacgtatcaatccggtcgatcttcccgcttccaaaattcatctcgtatccgcttggttcaaaatcccctttttccatctgtctggtcagcgcccacaccgatcgccggagcagctgtttgatacgcacgatcatatattcgttgcgtgccgtactataaaggaccgtattcccataatccttgatactttcttccacactttcttcaatcatatcatctctttgtttttcgcccaactctggccacggtatttgtttctcctgtgcttttctggaaaatcgttccatagactgatgggcaatatttccaagatccattgcctcgaactcatagcgctcccgatccgaaagctgcagaccataagtcagaaaatgcgcatatgcacaggccgaaaagcgttccagccttgtgacgctaaatctcttattctctccatataattctgccgcctctccctctgtgagcgaatccggttctttcttaaaaaatccggcatccaaaatcctgtcgatctttttcttttcattctgtcgataccaggtataaagctctttccatgattcatccacgcccagataccggtcacgaactccacggatcacaaattccagcccttctcccggggtcagctctctttgcgtcacgagaagctcctcctcttctgtaacagcaagtcccgggaacagttttttcaaatcccggatcagatatgccggacgtaatgtctttccatctgaagaaaccttactatacgaaatgtgaagaaattcttctggtttggtcagattcatatacagataaaacttctgaatgtaggtcttttcttttactcctagtgagagcgcctgcttctctttttgaaaccactctctgtccctttcggtaagcaatcccgtctgccccatatttccgggaagcagcgtatcatttgctcccacaaaaaacaatgctttcagattgctttttaatcgtgttctctgtacgtccccgatcatgacctgatccattccgggcgggatcactcccaccttcgcctcttccagccctgcgtccagaagctcgcaatacgcggtcagcgcaatctcttcttctcccagaagctctgcaaatttatcaaacagatccagtacaattcgataaatctgagcatattctttcgccaaagcccattccttttgttcctcaaatcgatgttccatctcttttagtttttcctggattttattttccacgaaaaaatgatatacggcttcacagatatcccgcactgttttttttcgctgtttcaggacaaagacaagatcgtctgccatttctacaaaccgcacccgcagaccattgagcaggctcaattcttcttcatccactgcgcctgtctttctcgaccagacttcctgccatttcctgtagcccctgagtcctactgccaccacataattttccagacgatcgatctcatctcttgtaaattctgtaaatcccgttcgcaaaaaccgaaagacgctttcataggaaaaatccttctctgccatagccaaaaggcttcttacatattctacaaacgcattcaggagaatactttttttatagtctacaaacaccggaatctgatattccacgcatgcacgctccagatgctctgcatatgtggacatctcactgcaaatgactgcgatatcccgataatgatacccattttcccgtaccagtctgcgaatcttctgtgcagtaagttttgcttccatgtccgggctccctgctgcatatactgaaatcgccctgttctccttcgaatactgtctttgggaataacgaaacagctctgattccagaaagccaagctccggattggctctgaagcgatacaccggtctgtcatgcagcctgaccggctctgcaatctccacacgcttgtctctggcaatctgtaccagactggtcaccatctgcttaccaagtgcaaacaactggtatggatgtgtatagcgaaaagcatcctctcgcccatccatcacaactgttatatacatttctttacaaatgttcatcaattcaccaagaagccggctttgcaccggagtaaatcccgtaaatccgtccaatgcgatcacactgtttttcaataactctgactttgagaccagcccactgagcacatccagcagctcttcttttgtaatatatttctctgcaaggaactgttcaaatccttcataaagcatccgaatatctgacagcttatcgtataaaaagctttcttcatccagatccttcatcagttcatccagttcttcaaaccccaccccatactgcataaattccgaaatcacggactttacctcactgatgtacccctgcttttttagatttccttttaatattttaagcctgtcttcatactgtcctgctatcctgcgaaggatcaggttctttccttcatcatccagaacccttgctctggactgccctacctcctcaaaaatacggtgtgccattcgtccgaagctcaacacatcaatgttcatgatcccatggttcggatgcatattgcacagatcaagctgcgtctgcatggtaaactgctccggcacaatgaccagataattcgtcccgggatgttccatcgattcctgaatgatcttttcatagagaatatgcgattttccagctccggaatttcctaaaataaattgaagcatactgtgtcctttcttgtccatttctcctgtttgtcttattgtagcagacctgtactcctgcttctagtctgaattaaaaaatctccgggctgccccgaagattttctgttctttctattttcttttttcaaccgccaggatcacagtcatggaaaggagtgccagaatacagtacggtgcaggattcgccgcatctcctgttacaactccggttcctgacggacgtccggctgggatgttttctgccggagtttctggtttttcctcccactcacttttgggatggatttcgatctcatatacaggcattccttgttccatcaccggtactgcgaccaaaaacggagccactgcaaaaagtccttcctcaacagaatatcgctctgtctgaccaataagatacagcccctctttcaaattggaaaatacaagctttccatttttatccgtctcccgattcacgcctttcagcttttgctcttttgcatacttccacaacaattctgcattctcccgctgtccggaggcagaagaatcattcagcgcaacctgtgctcttctgaattcatctgtcagttcccagccattttctgttgaatttccaacctgatacaatgcgaactttgctccttcaaaaacaacttctttctggtgcatcgacgttcctttgcataggatctctatccgtcctgtttcctgcgcatgaactgctcttgttccgaatatccccatacagaccaaaactgcgatgcaaaccagcactctgaatctaatgtctgcgccttttctcattcttttttctcctcttctgcttctttggctgcgttctcaaactgatcagcttcatcgttccccagatcaatcccagacagatcaaaccgatcagcaatattttcagatgcagcggcatcctggctttctgtgccattgcctgctcttcaatcttctcttcatacggaattctgtgtccccgcactaagagccgatgggtattgacagaatacggggtacatgtaaccaaagtcatcagatcctgcccctgctcaattttcaacgcatcgatctgcgttggcagaaccgtcagaatctgatctacttcatatgccagtgtttcatgcatgactttgacaaagaagacatcgcccatctccagctgatccaaatctgtaaacagctccgccgaaggcagccccctgtgcccggtcaggacactgtgcgtagagtctcctccaaccggaagggacgtatttcctacatgcccaactccactttgcaagacccgctcttctgttccatgatagatcggaagagtcacgcggatctttggaatcttcaaatatcccatcatcccgtttccatccagatccaatgcattcagatacgcttcatcctctgtctgtgtcccgttggaaaatggatcttcgatggcatttaacgctgtaagtgacgcattgtatgctgctgcctgctccaggatctgccgttcctcttccggctgtatgtcctgcaggatctgctcataggacgaaacgatcgtcgttgcattcctttcctgcaagtaattgctcacagtcgggtataataatacagaaaagccaagaagatagcccatgatcctcaataatttcagtcctgtctttcgcatatcttatttcctttcctctattattatgaatatcatgcggtcagatgctgaccgcatgatacttctcttatgaatgtttgcgttttttacttctcattgaacagatcatcacaactgccagaatcgcaacacctgcaattgtaaagatgactgctccgatacctccggtatttggaagctgtgttccggatttattttcaactttgattgtcggagattgattcacctgattagacgaaactgtctctgtaatgccattgtatgtatagttcacatcatatttcgtcagttttccttccttactataagttggtttaatcacgatctcgatcggccccgtcaacgcattgtatccatccggtgtggtggtctctttcagataataggttccttcatccaatcctttgaactgaattttaccagatgccggagtgattgcttctacccctacctcctctgcttttgcttttcgataaactgctgcgttttgaccatctcctgcagactcttgtacaaccttcacttcgttcatacagtctttatctgtatatagtttaaatccaactccgctcaatggggattcttgttgatttgccatgaaatatttgtttactgtaaaatcaaaggtatgaacatctaccacatctggaacagatggaaccccagcacttggattggaaggatcattactgtattctacctccgccttattggtattcggattcataccgacaactgccttctcattcacggtagctgtatatgtcacaacaatcggttgtcctacctgatttttgtagttgataaaatttaaaatttcaatcgtgattgcatttggattttctcccccctgagtcagttgataccctgtatctgctgccagtgtctgatttccaatcttaacttctgtaactcccccaaatgtcagtcctgctgacagagtatctttaaatttgaatacataagaatcatatcctgtcatatccggaacatgagaagtcagtgtataagtcactgtatctccgattgctgtgctctggtcgtctgcagtcttatctacgaccggataagaactcttcatattgattgtaacagtagaatctgtaacattgatcagcatcgccggagttgctacgtcacctgtaattccatccacgttggttgcccctgcgaaattaaacagataaaatccatatgcaagacccgataccgttgttgtcgtttctgttgttgttgtcgttgtaccattcgttttatttgctaatgtccaggccaaaagttcctgagacaatgcttttcttgcatctggtgctgtctgattgctgacatactcgtatgccttctgagaaagagcctctcctgtcagacctgtacacccatattttgcatttgatgtgaaaaatccttcgaactcctgattcagcgtatatgcaaccgctgttccactttttgttgcactgaaaatctgataatatgtcaggttcttgcccgcaaccgtattattgattgtaacagttcctgtcgcagcagcatttgcttctaattctcctgctgccagagttgtcaatgtcattccaaacaacatgattcctgccatcaaaattgacagcatacttttgatccatttcttttgtcttttcatcttttttctcctttttcctattttccggtctacctgtgtgcattttgctttctttttctatccccctgactttcttttttcttcctgctgcaaattgtaaccgccagaactgcaacacctgcaagcatgaagatccatgcaccgattcccccagttcccggaaggaatccccaatatttatttgtgatcacaaccgaataagcatcttttccccattcgtatgtggtcgtatattttttcaaaacactgccatccggcttcaactcttctacgatatattgatatttataagacgccagtacattccccgcgctgtcggtttctacatgataaacttccagatccggaaggatcgtcttccacacgttcttttcctgatcttttccatttaaagtaatcgtatgcgacgggtcttcattgaatgtggtatcccagatctcctgtccgcccttttcatattttctcgtaattttaatctgaatttcccctggacggtttggattggaaaagtctttccacactttctgaatcgtcaggaaaaatttctccgcacaaggatcctgcatctctggtgtctccggctgttcggtgtctccattgtccatcgctcgagttccttccatcagcactgcagatgcacccgattcccatacatacagctgtttcttttcacttccgcttgcattggtcaaatatgcgtcctgatagtctttatgtcggctcatgattgggaaatgcgttacagtatagatattaaacagctttccatctacttctccctgtcgaaattctgtctggaatacaccttttcccggtgccactgcctgtttcagatctgctgcttcctgccggtagatctgataactgtttccctgaccaaccacatctttttcttcctgataatggctgtttaattccatctggccaataaactctccgatttttccggaagcaccacgaatctcatctgcctggatcatctgattctggatcacatagccttcctgatccaatccgataaatcctccggcgattcctttcacgccctgtccatcccggtcgaactctgcatttcctccatacacatcatatccgtatgaaactccctgaatactgctttctgtaatcttcgttcgattggctttgatcagattaatctgtaaattggaattgtccttcacaccatccggtgagcatggaagcttcacagtcgaatccccgatcgttatgatcgcaacatcgtctcctccttcatttgggtctgcccgattcagcgcaacgctgatctccagtccaagcagcgtcactcccagtgtctttccatctgccagaagctgaattttcagcaaaccgccaagtcctacattgattacacccaaatcctgcagattccctatataaagaatctccaaaagtttattcacgatttgcagtacggcatttagtactacagaattggcttctgcctctaccaaatatgccatcgttgtttttccggcaaaacctcctgcaatctcctcactggaaactttcttaacattgagcacatgacaatcccggatccttgccagatccgcaagccctgtaaaacctccggcaatttcctctgaaccgccctgtccgtttactgtaaatcctgccgggattccggtgacacggcaagattcaatcgtagaaccacagacatccagaactccggctgtcactcccaaaatacctcctgcgacattcgcagaatcaatgtccactgttccgctttttcccaagtgtccggcaaagcctccggcatagtttggagcatgaatctgattgattccctgtgcttcgcaattctttacgcttccgtttaatactgctccggcaaagccccctgcacttccactgtatacaatagattcctgctgcccgaatcgttcttccctgtctgcagacacggaaatcccctctccggaagcagtcacttctgcctcgtaaatataacttctgaatgcatccagcacactgatattcccggctgtgatcagacctaaaattccagtcttgtgatcatcggaaagggaagccacgcttgccacatctgaaagtcccacaaatcctccggcataatatcctccggctactttctgcaatccagatacatgaacccctttttgttccttctgatctccaatgacagctcctgtgatctcaccggcaaagcctccggcataatccggtgtctgctgcgaataatatccttctattctcagtccgtccgccacaccatttacctgtgcataatgtacggtagaaaccgttgcctgcagtactttggccagattgtccacgtcttttaaaagaaaattcagaataccgccgatcagaccagatgtgtttcctgtactcacatctgcaacggatcccggatcgatctttccggcgaatcctccaactgcattgccgcctttgacagaacgcactgcatccgccttacaaggagactcctgcgttccccatatctgtccgccgatcacaactcctgcaaatcctccggcatttccctgtcccatttgatatgccgttccaaacgcttctacactcactccagaacgatatcccgataccgatgctctctttacaaccggaacaaacacttccactgctttgagcagatctcccagcccaagatccaaaaggccaagtaaggaaacacttccaaactgtgcggctcctcctgtcagcatttctccggaaaaacctccagcgcttcgcatcgcagacaccttcttgagatcttctacctgcgcgtcggtaaccgttccacctttcattcttccgttatagcctccggcacatccagaatccgcctgaatgccctgctccagctcagaccggtctcttccggcttttacctgaaatccataggtatactgttccaacattgcctgcagctgttcttcggtctctactttctgaacccattctccataggtcttgtcacttcctacatactctacccatgcattccatgttgcaatatccaaaaatttcaatggtccatacactgccgtatgttcttctgtcgggtacattgcgtttaaaattccaagcacatttcccacttttacaagaccatccaggatctctacgcttccaagctctgccgtggatgcacattccatgaaacctgtgaatcctccggcatactcatatccataaaccgaacgcagccggatcgccgaacacgctgtctgctctcctgtgtaggctgcccccttccagtctcttgcatcatttccccagatatgaccacctgcattatgtcctgcataacctccggccattccccggaataccgcccgatccgatgctgcatctgcacgtactgcaccaccgcatggaacacaggatgtatgactgttacggatggtcggaacaaacgtctgccccagactcagcagtccatctacattcaacagatgagacagcaatccgcctccggtcttatctaagagagacgccacatctcccggctgcaattctcctacatagccaccggctgtctcttgtccgatgatatactcaaagttttccacatgagaattctgaatatgtcctccgttgatcagtcccgcataaccacctgcatacccgatcattccgctgctgtcttttccactggctttcacgctaaatccacctggttttccataaaccggtgaaaattcaatcactgagacaaccaccgacaatgcagataacacatctgtaagctgaaggctctgtcccagaagttccagtccgcttccaagagaagctgcacttccgatatccataaatccgatgcatccaccggcatatttcggtgcggtcaccgcatatgcgctgcttgcatcaaagtacgatggggcattgttgttttccagctctttgggcggcacaacctttgtgtgcttcagaccatccactgcagaccgtgaaacctgaactccgcttccccagccgatcagcccgcctgcacttccggaatggctgtctgtttcttttattttttctgcagatacggtaaaacctgtctcagaatggacacctgccgctgtgatgattggaatatacgcattcacaacactcaacagatcgctgatggaaatattcaatcccttgattccgccaagaaggctcaaacctccgctttctgcaagaccgccggaatatgccttcccggcaaatcctccggcgtagtaagttccttttaccgcttccagccggtatactgcatacggctctccaagactgctgttatttaccgttccactctgcatatctcccagaaaacctccggcaacagctgcctccgcctggactcctcctgcattggaaacataaaaaaccgtacaggagtcatactttggaatcaaatacgccgctgcactgagcagatgatcaatactcaaaattccaggaagcttcacttcacttcctgccccctgatctgccagagatgcaaggcctccagttttcgaaattccgcaaaaaccacccactgctccatcttccagatctgcacggacaaatttcaaattacgaaccgtacaatttactgcctctgcacttccactctcacccaaaaatccaccggctgcaaattgatccttcgcccctgccttattggcacctgctgctgtcacttcaaatccagatgcgattccttccacactgctgttgtctactttcaggacaactccctgtgccagggaaagcaggctgctgatcttcaataaattgagtcccaaaagatccagtcctccactgttgaccagacttccggttccagcgcttccggcaaatccaccggcaagattctttgccgatacactgccaagattctttacggttacattcgtaatgtttccaccaattccctgtccgactgctcctcctgcgtaatctccttttgcagagacactgtatccagccgcttctccctgcaccgtcacatcttgaatggaaaatggaagataatctccgattccaagcgtcgtatccagaatgcctccggcacttgctgtgcccgcatatccgatcacgccgcctgcatatccttgttccacctggatctgctgcagattcagaacggtattggctgcacctgtccctgcataattcacttttccctttgcaaatggacgtaacgcctgtacattttccaaagaagatgacaaaatcttacatccgtctcctcttccggcgattccacctgcatattgagaggcatgaagctgaagccctttttcacttccctgtaccgtacatcctaagatttcggatggcttaattccaacaagagataacagtgcggattctttttctgcatttccgcctaatatggttcccagcccttctttgatcacattgagcaggttattctgactgcttccaaaatattgttccagagaaattgcagttccaagcgaagcaaatccggtaaagccacctgcatactcctgttccgcatgtacctgttccacgccggatacgctgcagtcaaccgcataactgtttgccatacttccggtaaaaccacccgcaaaattctcagccacaactcctgccacgcctgtcaccgttgaaccggctgtcacagactggatcatcaatccatccaccagattcaccccgagatcatgaagtgctcctttgatctctgcattggctgtaatcccggaaaaaccaccggcgaatacctttccctgtatctgcagattttctgctgataccgaagaatttgtaatataacttccggtctgttttccgacaaatccgccattatagctggttgtcctctcacctaactgcccgaatcccggagcatatgtcacatgacacccgtcgatcaccggattgtaatagccgaccggaatcaactgatccacgtttaataaatttccatccagaagaatcgtgatcaagtctcccagacccaaaaatggaatcacattcaataacttctccaataatgtggtaattcctcccaacaggccgctcaaaccttcatactgagtcattccttccacatttcctgcgaacccaccggtaatgtcttttacatttcctatagaaaggttctttacttcacagccggaaatctgaacttctccgtatactcgtccgacaaatccgccggctgcaaaatacgagggatcctttccagcaatgttcgtcagattcattaacaactctgacaaagatcccagacctacaagatccaggatgggctttaacaacagtcccaacagaccacccaacagaccgaccagtccctcaatcagcgaggtgttatctttgatctttgtactgttattttgaacgtgtacggtatccagcgtaagatgagacacagaaaccagacctgcggacctcacataatccactctctcgctggaaatggttccgaaaaagccgatccccatatttttttccatgtccagatctccgttttgtaccacttctatattggatatggtcggattgacacctggctgcatattcagccgtccttccatctttccggaaaacatcaatggcgtccaggcaacacctgccagatcgatgtcacggaagatgatgtatttctcactccggctgtaagaatgtcctgaattttcgatatccatattcggatcaatttccccggttttttgattcactccacatcttcctgtcaacgctcctgatgcacgctcaatttcctgaaatccatatgtttttttcccattctgctcctgcaaaagatctgcatctcctccataaagcatgatgggattcccctgggcgtctgtatccaccttccatgtcactccgactaatttcgcctgatataccgctgtatatacctttttatcagaacctatggcctgaagctgctctttatttccgatcagaatgaattcttccccatgttcatcagtatagaggacttgtccctggaatgttcttccatcctgtgctgaagcaagagtctgtactttcgactctggcatctccgtcgtaaaatgtctggaaatcacatattgatgggagtgactgtatgtaacgtattgatccccgctggacggaaacaccagatttccggttccaaaaagttccggatcataatcgttgctcatgatcggttcctgttccgctgtttcaagcctcatcgtcatcaattgatagaaatgatagagatataccgtatctgtctcttcctgatacacaactggatctgcggatgcttcttccccgataaaattgccgcagaatcctgccggcagctgccagatatcgttcggatcccagacaatatcattcatcatctgataggttccgtctactgcatatgtaacagtctgtccttctaatacaagcggttcgccctgaccaaaggtctcctcctttatgtctcctgttcggatttcccgtccgcttccgaccgcttttaactgttcccggttatataatttgattactccgttttccaatagttctgtatggaaattttcttcctgcggcgctgctttccccgaatccatcacggactccccttgtccggtggtttttatctgcgattccccatatgtttcttttatctctcctgcatatacaggaacgctttgaaacaggactgcaatacacaaaagccatgcgatccactgtctgcacacttttcgatatttcttctttgacatatccaaactcctcattcgatttcttttcattccccaatatctatgtctaaaatctctgttttttcgacatagcgcaaaaaatctgtcgataacatcgagtattataccacttttatttttattatcaatacattttcctgttttcattctttttttctgtttttttcttcttttttattacccccccccgcatatttttcgcatttttctttaatttgtcagatattttttacttttttctctataaaacgaaaaaaagcagctgtaaatagccgctttttcttctatacttatttttctatcctcatctttcctttacagatgagctgcgtcatcgttcccatcgggcaatatacgcaccaggagcgtggcttaaacaaaagcatggtcacaaacccaagcactgtagaggtcagcatcacactgtaaaatccaaatgcaaactgtgctgcccacggagatacattcacaccatgataggcccaattccacggaagtttccaggtccacaataaagtaaccacctgacgcagactttccgctcccgaaaatacaagatatgtattccacagcatttgaaagaacatcacaaaaaagaaaatcagaaatccataacggaatcccttacttttcatccatcccggaacatcttttctgcgtgataatccaaatctgccgccaatcacttcaaacaactgccctcttccgcaatatcggttgcaatatcctttatttccctttacaaccgcaatgatcaggggaataaaaaaacaaagaagtcccagccatgcaaataagatctgaaaaaatcccaatatcagatagatcagggaaacgatccacaaatagtcataccagcgctttttcattctgtcacctcccgtattgaaattaccgttgcaggacatgcctttgcacactttccacaaccaatacatgtttcctgatctacgatcgccatcactccgcgaaatacttcaattgccgacatcggacagactttgacacagcatccgcaggcaacacaatcccctgcctccacatatgcttttcgcctctttcgtttcacctgactcataagaaacctcccaaaaataatatagagccaacagacaactttttgcctgctggctctgatattatataaaacaagcctgttcttttctgtgatattatcacgcagatctcgatccttctgtctcttgcagccattcaaatgcgagatcgatccatcccgcaacatgcggatcttcatgctcgtctctgacttttgtctgctcatttgcaagcgaaagcccatgacatcctctgtgatacatatgacactctgcgtccaccccatgatgcagcagagcctgcatataggatattgtattccctgcgggtacggttccatccgtattcgtatgccagataaacgtccttggcgtctgctccgtcaccagatcctgcgcgccttcccaggcgctttctctgcagattcgttcccgcactgcatcttctttgggccatcctgcgtttagatcaatgaccggatagcacagaatcatggcatgtacctgcatctgttcccggctgtaccctgtcttttcctcaaaccagtcctgctgataaaatccactataaagcgcgcacagatttccgcctgctgagcatcccagaattgtgatcttttctccatctacgttccacagttcctgatgttcttttacatatgcaactgcctttgcaagatccatctgtggatatggaagcagtccctgcgtctcctgttcttctaatacagcatattctaaaacaaatgcctgatatcctctttttaaaaattccagagcaacaggctccccttctctgtctgactgatattcatatccgccgcccgggcagatgatcaccgccggacgccgacgtgatggaacactctccagattctcctgcacatacgttgtaagtatcgcatcccgtgttccgtatccactgtttcccaaattgattttttcatgcagcattggtcattctctcctttttctttctggaaacattataggcttgttttttctttctgacaacctctttctcttactgataccacaccatagattcatatgcacgcaatttccatacacccctctgcggattgttgtctttcggataattgcttaacatacactgatatccgctcacgtccagcccggactcccaactgcattcttttgcataaaagttatttacaacaagaagtcggtgcccctcgtattctctcatatatgcaaatacaccgggatgcttctctgccagtggacaaatcgaaccataggcgatcacatccagctcttttcgcatctgtaccagcttctgatagtgtacaaagatggaatccggatcctgtatctgacttttgacattgatggtactgtgattttcgttcacctggatccacggctcactttgtgcagatacatctgtaaatccggcatatttactgtcatcccactgcatcggtgttcttccgttatctctggaatgtacctgaatgatccgaagtgcatccgatgctgacagccctttttcctgcaggatctgataataattctgactttccacatcccgaaactgtgtaatcgcggtaaagtctgtattcgtcattccgatctcttctccctgataaatatagggagttcctctcatacagtggatcaccgttgccagcattttggctgactccttccaatattttccggtatctccaaatctggaaacaacccttggctgatcatgattgcaccaaaacagtgcattccatgcctgatgttgcgccatctgagtctgccactgaaacaaaatctgtttcagctttccaaagtcagcaggtactaacacccacttctcgtttcccataaaatccacttttaaatgatgaaaactaaataccatggaaagttcatgggcatcttttcctgcatagccataacaattttcaatggatgtactggacatttctcccactgtaaggattccctcttttattccgaaggtggcttcattgagttctttcaagtatcggtgaacattggggccgtccgtgtaaaatctgcgtccgtccccgatgttgtcatcttcaaacttttctttgctgatcagattgactacgtcaaaccggaatccacgcacgcctttctccatccagaacgataccactttctgcacttcctgtcggacatgtacattgtcccagttcagatccggctgtgtcacatcaaataaatgcagataatattcgtcaaatttttctacatattcccatgcacttccgccaaatttactttcccagttggtcggcggctccccattttctttgcccttgcaaaagaaaaagaagtctttgtaataaggatctccttccagcgcctttcgaaaccattcatgtctgctggatacgtgattgaataccatatcaaacatcagaccgatgtctcttttttcggcttcccggatcagttcttccacatcttccatggttccatatcgcggatcgatgttgtaataatcttctacatcatacccgttgtcattctgtggagaaacaaaaaacggggtcagccagatataatccacaccaagtgtccgaatataatccagtttttcgatcacacctcttaaatctccctgaccatctccattactgtcacgaaatgatttgggataaatctgatatactgtactttttttgaaatctctgttcatatcttcactcctaccgataagaaataacggttgtactgccagcagcagccttcatgcctgtttctgtttttatttcttttgccgtgccttcccctgtgatcagcagcatggtcgtatcctggtatcctgcttcccggatcacctgtctgtcaaaccggatcaaagggtctgcgcaagttacagcctgtccttctttcaccagcagttcaaacccttttcctcccagttctaccgtatcgatccctacgtggatcagtaattccattccattatccagtgtcattccacaggcatgccctgtctcttccataaccactgtcacgattccatctgccggtgctttcactacgttgtccacaggctcaatggcaacaccatcccccatcactttctgtgaaaatacctggtcatttacttcttccagaggaatcactttaccagataccactgccttgatctctccgttcttttccggtctgcagattccccgctctttttctgataattttttctttccgatgatccaggtcagacaaaacggcactacgatcgcaatccccattgccagaaggaatatcagataaaactgtggtttgatcgaaagaatacccggaagtcctcctactcctacactcagtgcttctactccaaatcccaccgataccattgctgcagcggcagaaccaatcattccgcacaccagtgggaatccatattttaagttcactccgaacaaagccggttctgtcactcccagataacaggaaatgcatgcgggaacgttgatctgctgtgcacgctcgttctttttctgcagagcagacatcgccaacacactggatccttgtgcaatattagacaaagcgatcattggccagagtatcgttcctttataagtattgaccagctgcgtatcgattgcatttgtcatgtgatgcagaccggtcataacaagcggtgcatagagcagaccgaagattcccgcaaagatccagccaaactgagaaaataatccactgtaaacaacattggcaagtgcatcccctatcttccatccgatcggtcctacgattgtatgtgcaatgatcactgccggaacaagggaacaaaacgggactatgatcatactgatcacttccggacaatacttcttaaaaaacttttccagatagaccagtacaaatccggccagcattgccgcgatcacctgcccctgatagccgatcatctgtactttggcaaatccaaaatcccagaccggaatctcagccgccggtgtggacgccacactgaagccattcaaaagctgtggagacacaagcgtcagccccagaatgatccccaggatctgtgttgttcccatcttctttgtgatcgaccatacgatcccaaccggcagcaaatggaatacagcttctccaatcagccacaggaaactatagacgcctgaccagaactgcgaaatatcagcaagactttgggttccattatggaaaaactggatctctccgatgacattacgaaatcccaggatcaatccaccgcacacgagagccggaatcagaggagcaaaaatctctcccagagcccccatcatcttctggatcggattctggtttgtcttagctgccgcttttaccgcatctttgctgactccttcaatccctgcatatgcagtaaattcattataaaagacggaaacatcgttcccgatgatcacctgatactgtcctgcctgtgtaaatgttccttttacacttggcagtttctcaattgcttctgtatctgcctttccctgatccaacaatacaaagcgcattctggtcatgcagtgcgaaactgcctgaatgttttcttttccacccacatattgaagcagtgcttttacatcattctcatattttcccattttgtttctcctttcctatcttgtttgaacaagtttagaataccacacttgtttgaacatgtcaatgttgttttcaaaatttgtttgaacatgttgagaaaaccatgtataataaaaacaaatatgagcaaaagaaaggaaccctgtcatgccaaaagcaaaatacgataccatttaccgtgacttaaaagagcagattgaatccgaaacctttgcctaccaggaacttcttccttccgaacatacactggtacagacatatgactgttccaggaataccatccgccgtgccattgcagaactgactgcagaaggatatgtacagcccatgcacggaaaaggagtacgcaatatcttccgtcccatcgatcaggctgcctatacggtcggaggaattgaatccttccaggagtcttccagacgaaatcacaagacatcggccacccggatattgcaattcacagaattgtgtgcagattccaaaattgctaaacgcaccggatttcaagaaggaagttctctctattatattcagagacttcgttttctggatcaaaaaccattgatcctcgaccataattattttttaaaagaaatgactcctggtcttacaccggagattgccgcacattctatctatgaatatctggaacaaaccctgcatttaaatatttccaccagcaagcgcacattgactgtcgaaaaagtgactcaggtagacgagacctatctggatctcaaagattacaactgcatggccgtgatcaccagtcagacctttgatgacaatgggatgcagtttgaatatactcaatccagacaccggccggattattttcgttttcaggacgtggcagtgcgaaagaaatagtatttcttttcctgcttcatgcaacaggcagctgatcttctgaccagctgcctgcttttcttttccatcttttgttgtccttataaaagtccgattactccactcttggataatgcaccaatatgcttgtttgcgatctctccgttcttgatcacaagcagtgttggaatggtcatcactccatatttctgagccagttccatctgctcgtctacattgatctttccgactttgatgtcttccctttcttctgccacttcatctacgatcggagaaagcatctggcacggtccgcaccagtctgcataaaaatctaccaataccggtttctctgcttttaatacttcctgttcaaaattgtcctttgttaattttataattgccattctgtaaatcctccttcaatgttcatctgctcttagtataccacctttttgtgtttcttccgtgacaaaatcacatttttcatattttttccaaagctcttgcattcaatacctcgatgtatcctctcgacagtctgacatatccttctgtctggaactgtttgagcagtcttgtgaccacttctctggccgtccccatatctcttgcaagcacatcatgggtgatcgcaaatttttctgttcctgccaaagccatatgctccaggatcgctcctgccagtcgggatgccgcattggaaaatacatattggttaaacagccacatcacatccgaaaaacgctcggaaaccatctccatcgtatagtctttcactgctgcattcgcatcattcaattttttatagacatctttggggattgtacaaaggaccgcatccgattccatcatcatatccagagaaatgtccatccctttcatcatacaggatgcgcttaatatgctgacatccccctcaaccaggcgatacagggtgatctctccgccgcctggagacgtaatataaacccgcacctgtccttcttttacaatctggactcctgcacactcgcctccgtcgatatgcagcaaaacacctttttcatatttttcctctgcggtatgcatacacagcatctgtttttgtgtttctgtcagatctttccaaaacggcaggacctgaccgatccattcattcataagttcctccattcatttattgtaaataggccgtcacaatgtttcgcactttctgcgtcacataaccgctgccgccttttgtctttacatcctctaccattccaatgactgcaatctgtgtcggcatctcctctgttgtctcacagataaaccagccccgttccacacctgttgtatcatcctggctttccttgatctccgctgtccccgtctttccaagtaatgttatcccatccaccttcgcaccggctccggttccacttggattttcgaccactgagagcaggctctgttttacggtctgcgccgtccgggcactgatcgcatgctccttccagatttttgcggccgcaccctcctgatgctttaatacaggctggatcatatttccctcattgacaaacatggaatacatggacaaaagatgaagcggattcaccagtgtctgtccctgcccataccccgtatccgcaagctggatctcagattcgatttctccatcctcatcaaatgtagatttctgcatgggcagatcaaacggcattgtttcctcgaaaccaaatgatttcagcttttcttccatcgtatctgccccaatcttcagcgcttctcttgcaaaataaatattatccgaatatgtcatggcgttgagcaggttgaccgtttctccataatccgtcaaggtcgtcacatgatagtctccccagcttgcatccttttgccaggaaagtcccacatatccaagattctcatccggatccgtgattccggcatccacaccaactgctgctgtgattcctttgaaggtagaccccggaacccaggtgttcacaaaccggttcatcagcggattggccgcatcttcgttgagcgccttccatcttgcgtctgacattcccagcacaaattcattcgggtcatatcccggggtactcaccaatgccagtacttctcctgtctttggattcattgccgccgctgttccgggatcctgcgcaaactgctcatatgctgcccgctgcaattctgcatcgatcgtcacacgcacatcttttccatcctgtgccggctcatatgccagggtctctatcgtatccccctctccgttttcaatgataatgcgcgttccatctacaggacgcagctcttcttcataagcctgttccaatccggctcttccgatcacactattcgcatgatatcctttgcctgccagcttttccagatcctctgctgttaccgcctgcacatatcccgtcaaatgtcctgctgctgccccaagaggatagactctgtcccgggcatcattgagcatcaccccggggatcgtcaaaagctgtgcttctttttcttcatttcctctggcaatttttttgattggaacaaacgaatcctcctgaacgtaagatgctcccagcgcattttgtatcgtatcttcggatatttccaatatctgcgccagtttctggatagattctgttttcgccgcatcatcccccattttcccaggtaccaggcctacttccgttacggttccattgacagccagaattgccccatctctgtcatagatcgttcctctgttcgcacgctctgtctggatctggactctatacgactcttgaagatttggaaaaataagcgtagaatcccaatcgatcttgtactctccattctctttctgcagtgtcatctcattctcaaaagaaatctcatctgcacttgtctgcatcgtttgtgaatatttcacagtcaccggattttctttagacttttcgtatttcggaacgaccgttttgatgttttttgcttcaatcccttcataaatattctgattgcgctctgtaaattcttgttctgacacggtttcttttgtcgcttcactgagcatggcatacatcttgtcatactgccctttttccacaaatgaaaaataatttttcaccgtttcctgtggagttgccgtattgatcaacagtttccacaccagaattcctccccctgcaaggattaccgccactcctgctgtaatcccaccgatcagaagacccgttttattttttcttttcttcatactgccctccaaatgtcaatcctggatcacaagtaaaacaaaaacaccttgtatatggtttgttccaatcataccacatacaaggtgttttgacactatggaatctgattttaaaaggaattcttacatgctctccagagccgttccttcacttcatccggtgcaaatgccacttcaattgcattgtttgtcatctgtagttcctgttcttcgttcactgcatactgttctctgagaaatgaaaactctttttccagcgttgtctggctgactgtccggttatccgtattgatcgtgacaagaagattctccttcaggaactcctggatcggatactctgccggactttttactgcttttgtctgcatattgctaagcggacacatctcgatcccgatctttctgtctctgcagacctgaattgcctctttttgtcctcgaagtgcaattccatgtccaactctggatgcaccgcactgcacagcatccagaacattctgaacactgccgcactctcctgcatgaatcgtaaacggcatctccaatcgttttacttctgcaaacaaatccagaaactgtgacattggaaatgctgcttcgtttcctgccagatctgccgcacagactccattcccgagaaattgtctggctgctttgagcatcttaagattctccgcttctttctcatggcgcatagcacatacgatcacaccataatcaatgccaaattctgactttccctgctccattccctgaagtaccgattctataatccgttccacagaaagcccgttttgcacactcagcaatggagcaaaacgtgcttcaatataacggacagaatctgctgcagcattcttcacaaaatcatagcccgctctctttaatcccttttctgtctggagacactccaaaggaatttcaaatttctccagatactctgccagactctgacactccatatccgcctgcagatcttctaatctgacacttcttcctaaaagctcttctatacatccctgacttaaagaaccatccagatggcagtgcagatccaatctgggaagtctgttgttttctgtcatatgcgtctactccttcttttttagattccccgggccaaaaccaaacggcaaaaacgcttccagtgttttcgcaaaacatccgccctttccatcctccagaatgatctggaattctttcggatcacaaaattccatcattacctgacggcacaccccgcacggtgcacaaagctctccgcttttacttccttttaaacctccgacgatggcgatcgcctgaaactctgttaccccgtctgagactgcctgaaaaaacgcagtccgttctgcacagttcgtaacactgtacgccgcattttcaatattgcatcccagataaacagttccatttttcgccagaagtgcagcgcctacctcaaatccagaataaggggaataagatcgttcttttccctcatatgccagacggatcaactcctgttgtgtccgcttatccagctctgttccaaatttccattcttttttcattgcgccttctccccatactgattcttacgccagtgtctctccgatcagccggatggattctgtcaccagacgtttgaaatcctctgccactctgtctgctgtctcctgcacttctttatgatccagcttctgcgaagacattcctgctgccagattcgtaatacaggaaattccacacaccttcattcccatatgtcttgccgccatggcctcacatgccgtactcattccagctgcatctccacccagtgttctgcacattctgatctctgccggagtctcatagcttggaccggtaaattgcatatagacaccttcctgcagagctacatttgtattttccgcagccttgcggatcacatcctgtaattctttatgataaacttcactcatatccgggaaacgtactcccagctcttcaatattcggtccgatcagaggacttggaattgctgtcgtgatctggtctgtgatcagcatcagatctcccggatgaaagttaaaattcaccccgccggctgcattggtcagcatcacgatcttcgctcccagcattcccatcaggcgtaccggaagcaccacatcctgcatcggatacccttcataaaaatgcactcttccctgcatcgccacaacaggaactccttctacatatccaaacagaaatctgcccttgtgtcccgccactgtcgacaccggaaatccttcaatctctgtatactccatcgtctcttcgacctgcatcgtctctgcataatcccctaaccctgatcctaagatcagcgccactttcggctgaaatttaattttactcttcactgcatctgcacattttactaatttttcataaatcggattcatcatttcgtttcctttctaccaatggctcgatcagtttggatacaagcgcatgaatctgttcatactgcttttcatcgatataaaacgtctttcctatccggctgatcagcccctgctcttcaaatttttttactgcccggttcacagtctttacacttaagcccgaatattctgccagctcctgccgtgtattcgtaaacgatagttttccgttttttgcatactttttatagcggtgttcaaaaagaaccgccagccggtctgtccccggcacaaacatatatgtcctgctggtcactccctgttcatacagatactgtcccatgatcttggcttcctgcttcaatgcacggatatctgttcgaagccatctggcatacacatccgcagggatccgaatcgaagtacacggtgtgatcgtctgcagtgttgcctgataggtatccagatccatgatcaattccattccccccatggcattgatcccgtcaaactgcatgaaatcataagcaatcccatagactctgtaatctgtaattttaaacattcctcttgcaatgatatgcactgtatccacaggctgattttcccggataaacacaacatttttgtccagttccactacacggaatgactctaacagccagtctggagcatcctgaaaaaactgctcaatagcttcccttctgtcctttttcaactcccgcataaaagggagcacctcatataggcgttctgttcccatacatacccttcctttgtctctggtaaatagtctccttactattataaaacaaatcgccaaaaaaaacagaggttcttctattttcgagaaaaaatttccggctgacatttcaaacctgtcagccggatccattcatgccattcttatttgatcaactctacttttacaacgtctgtcagaattcctgttgcatctggaatcaccttaccatctgcacctttcatctggtcatttccgactttgatcgtaccatcttttaactggctatacagctcatcgtatttttcctgtgtaaatactttaaattttgatgtctccatcggaagttttacaccatcctgagcagcatccaaagtcactgtctttcctccctggaagctgtcattgtagtaatcttccagtgctccgtaaatagaatctccaagattcttcattgcggatgtgatgactgtctttgattctacagactggtcaacgtctacaccgattacaactttgtccgctgtctctgccgctttcataacagagtttccgactccgcctccacatgcaaagatacattctgttccttcattgtaccatgctgctgcttttgcattgttttccggagatgcatcgaagtttcctacatatgtgtatttcactttgacatctccagcgttgagtcccatatcttttgctgccgcatctgctccctgaacaaatccatatccgtaacggattaccgccggaacagcgataccacccataaatccaaggtttttgtatccttctgtcactgctgcatatcctgccagatatcctgcctgctcttctgcatacatgatagacattacattgtcttcgatctgtacatttccttctctgtcttttggttctgcatctacaagaataaagtgtacttctggatattttgtctgtgcttccatgatcggatactcaaacaaaaatcctggtgttgcgatcacctttgctccaccttttacagccagatcgatggcatttaaacaagcctcatctgatttttctgtcggtttgtagtatttgtgtgtcaggttgttgtctttcgcgtatttttcaagaccttcccatgttccctggttgaatgatttgtcatcgatcgttcctacgtctgtgatcagcgccagctcatatccgccttttccgcctttgtctccgtctttggattctgatccttcacttcccggttttgaaacacatcctgtcattcccacgacaagtgctgctgccatcagcagacttaacattttctttttcatactttctcctccttaatatccactggtctgttcgccctgaatcagtttgatcgcagagctggtaccaattctatcacatcctgcttccaggaatgcttccatatcagccactgtcttgacaccgcccgctgctttcatcttcacgtccggtccgatattctctttgaacaaacggatgtcctccagtgttgcgccggctgttccgaatccggtagaagtcttgatataatctgctcctgcctcagttacagccttgcacatcgcaatcttttcttcctctgtcagataacaggtctcgatgatcacttttaagatcttctctcctgtgatcttcttgagtgctgcgatttcagcctgcactgcatcgtaatttccatttttcacatccgagatattcactaccatatctacttccgatgccccgtcttccagtgctttttttgtctcggctgcttttgcttctgtcacactatacccaagcggaaatccaacgactgtacagatattgattttttcgccatacgtatcgtgtacacgccgaatatagcatggcggaatacatacagacgctgtctgatactcgatcgcttcctcgcataatttctgaatgtcttcccatgtggcaaatgctttcagctgtgtgtgatccacatgttttaaaatttctttttgatccatcttttttctgccgcctttctttttaaaaatattctacctgttcttttgtaacacgcgcatagacaagtttctcctcttctgcacgttcattttcctgcgtcacagcttcaagataacgcttcgctgctgcttcaaacaattcttctctggaagcatacatggttgccagagactcccctttttccacatgatctcccacttttttgtgaatgatgatacctgctgaaaaatcaatgctgctgtctttcgtttctcttccggcacccagcattgcggaagcaattccacaactctcggtatccataaaggtgatgtatccggatttttctgcacagacttcataagaatatggagcttttgcaaatttgtctgtatcccagatcactgcatcgtctccgccctgtgctcttaccattgctgccagatgctccaacgctctgccgttttcgatcacttcttttaccatgtctctgcactcatccagggttccttttcctgtcaggtaaagcatgttggaagcaaggttcatacaaacttccgtcagatcctcagggccgttccccttgagtgtctccactgcctcgatcacttccaggctgtttccgatattgtgccccaatgggatgtccatattggtgatcaaagccactgtacgcttgcctgcattttctccgatcgttaccatttcttttgcaagcgccacagaatcttccaatgtcttcataaatgcaccgcttccggttttgacatccaacaggatacaatcatttcctgctgccagctttttactcatgatcgaaaccgcgatcaatggaatactgtccacagtcgctgtcacgtcccggagcgcatacagctttttatctgccggagccagattaccggactgtccgattacgctgactcctgttttatttaccacttcaaaaaattcttctcttgtcaaagttgtacgcagtcccgggatagattccagtttatctaccgttccgcctgtatgtccaagccctcgcccggacatcttcgccactttggcaccacacgctgccacgatcggtgcaatgatcaatgtggtcttgtctcccacacctccggtagaatgcttatctactttggttccttcgattccggaaagatctaccatatctccggaatgtgccactgccaatgtcatggcaagtgtctcttcctctgtcatcccccggaaatacactgccatcaaaaatgcagacatctgataatccgggatattgccggctacatattcttctaccagataatgaatctcttcttgatttaaagattctccatttctttttttcatgatcaggtcatacattctcattgtcctgtccctgcctttcttacttatctgcttcccttgtcatatgggattccttctgctttcggcgcctgtgaattcttggagaagaatgccaggacgatcagtgttgcaatataaggaatcatcttatatacttcgttcggaatcggcagtgatttcaggaatggaatcgtcgaatatgcactggaaagtgtcttcatgattccaaagaagaatgctgccattaaaatcttgttgctcctccactgtccgaagatcagaaccgcaattgccaaaaatccgtatcctgctacacttgcattaaagtttgtagaagtcggaacaacaaagaccagtcctccgattccgccgagtacaccggaaatgatcactccggcataacggatcttatatacattgactcctacagaatccgctgctcccggatgttctccacaggcacggagtctgagtccgaattttgtattcttgatcacaaatgctgctactgcaaagatcagaattccaatataagtagaaatataacagttctggaagaacagatctccaattaccggaatatctccaagtaccggcactttatcaatatggaatgtatctgtgaactgtatctgctgcatcccctggatcatacgtgctgtaaaaattgcaaaagccggtgcaaacaggtttaacgccgtaccactgatggtctgatctgctttcatattgatggaagcaaatgcatgcaggagactgaacagtcctcctgtcagacccgccaccagcatggcgagcaggaacagcccctgaccgcttagacttccctggaaaatattgataaagaaaattccggcaaaggctcccatgaccatgattccttccagtgcgatattgatcacaccgcttcgctccgaatacattgctccgatcgcaacgatcagaagcggaatggcaaaatacatcgtctgctgtacaacgaaatatgctacgttcatgattgtccctcctttcctgcctgatcagctgctgcttttttctcagccttttttacttttctcatctggaatttataaatcgtatttttaaacaataaggaaagcgctccgcagtaaatgatcgctgcaatgatcatgtcaatgacttccggcgcaaaatcaaacagctgcatgttgtttccgcccactgtgatgtatccgatgaaaagtccggcaaacagaattccgatcggattggacagtccaagcagcgcaacggagattcctgaaaatccttccggtgcgatcacatccagtacctgcatgtattttccggagtttgccagatataacagagctccgcccaatccggaaagtgctcccgcgatcaccatggaaagcacgatattgcgcttttcattgattcctgcataccggctggcatccgggttcataccacaggccttcagttcgtatccaaaaatggtcttatttaataagatatagatcaggatcacacatccgatggcgatcagaataccgacattgatacttgcccccgggaacagtttgtccagccctccttttgggagattcgccccttcagccactgccagtgactggttctttacctgatcgtataccgtcttctggatcagcatgtttgtcagatacattccgatatagttcatcataatggatgaaattacttcatttacattgaaaaatgcttttaaaagtccgggaaccatcccccagagcgctcctgccaggattgccgccagaagtgccaccaggcaatgtaccccaggtggaaggaatgtaaattttactcctacaaataccgctgcaaatgcaccggctgtaaactgtccggacgctccgatattgaacagtccggtcttaaatgcaaatcctacggaaagacctgtcatgatcagcggtgtcgccatatacagcacctgtccgaatccctgcattccatccgtgaatccaccctggatgatcatcataaatccaccgaatgcctgacttggattactgatcagaagaatgatcagaccaaacagcaggccacagacgatcgcaaggatagaggaactgaaattgacaaagccttctcctttaaacaaattcttaatcttcattcttcacactccttttcgctcctgccatgtaaagtccgagttcttctgtcgtgatcttctttggatccagatccgcaacaatttctccttcgtacatgacgatgatcctgtcgctgacattcatcacttcttccagctccagagaaacaaggagaaccgcttttcccgcgtctctctgctcgatgagctgcttgtggatgtactcgatcgcacctacatccagcccacgtaccggctgtactgcgatcacaatctccggattgcggtccagctctctggcaatgatcgccttttgctgatttccaccggacattccccgggcaatactcttttcgccctggctggaacggatatcaaacttctcgatcagcattttcgcatactgacggatcgcatcaaattttaaaaatccgtgattctgaaatctctttgtatagtaagactgcagaaccaaattctcctgaagtgtgtaatccaaaaccagtccatccttgtgccggtcttccggaatatgtgcaactccgtccagacatttctggcggatgctctctttcgtaatatccttgccgtttaacatcacctgcccggcatcgatcggcatcaggcctgtgattccgtataccagctcagactgtccgtttccgtcaataccagccacacaaaggatctcgccttttcgcacctggaatgatacattgttgactgctgctttgccatgatgtttggactttactgtcagatttttcacttccagaacgggttctcccggtgtcatctccggtttgtctacaataaaattgaccttacgtccgaccatcatctcagacatctgctctttggatgtctccgccacctcaaccgttccaatatactttccttttcttaaaacactgcagcggttagccacttctttgatctcattgagcttatgtgtgataaagatgatcgactttccttccgcgatcagctgtttcatgaccttcatcaattcgctgatttcctgtggggtcagaaccgcagtcggctcatcaaagatcaggatatcattgtcacagtaaagcatctttaaaatctcgactctctgctgcatccctaccgtgatatctgaaatatacgcatccggatcgatcttgaatttgtatcgttcactgagctccattacttttttgcgggctgcatccattttgagcacacccatctttgttgtctcgcgtcccagaacaatactctccagaaccgtgaagttgtgtaccagtttgaaatgctggtgaaccatcccgattcccagatcattggcatcgttcggattgttgatatttactttcttgccgttgatgcggatttctccttcctccggctgatacaatccgaaaagaacgctcatcaatgttgattttcctgctccgttttcaccgagcaatgcgtggatctcgcctttttttacctggagggtgatatcatcgttggccttgaaatttccaaactgcttggtaatgtggttcatttcaattacatattccacactcgcttcctccctttctcttttatttctttaaaatgtattctttcatgcttgttccgtctgtgttattctctactccaaaaatatccaggatcgttgctgcaatgtctgcaaagctttctcttgttccaagatttacattttcccggatgctgctgccatagacaagaaacggcgtgtgctctctcgtatggtctgttcccggaaatcccggatcgcatccgtgatctgccgtgatcatcaaaatgtcatcctctctcatccgctccatgaatgttcccagctggcggtcaaatgttgtcgctgcctttgcataaccttcgatgttattacggtgaccatataccatatcaaaatctaccaggttcacaaaacagattccattgaaatccacgtcctgtgtctcgattgttttttccattccgtctacgttattctgaatgcgctgcgtatgctggattcctttccccgcaaaaatgtcataaatctttcctataccatacgtatcatatcctgcctccgcaagtgcatccagcatagtatcttttggcggcagcaaagaaaaatcgtgtctgttcgcagttcttgtaaaatccggtgcatttcctacaaacggtcttgcgatcacgcgtcctaccccgtgttctccaacgagcagcttccttgcaatctcacagtatcggtacagttcttcaatcggaacgacctcttcatgtgccgcgatctggaacacgctgtctgcggatgtatatacgatcaatgcacctgtctctatgtgctcctgtccataatcccggatcacatctgtacccgaatacggtttgttgcagatcacctttctgcccgtctcacgctcaaacgcgtccagtatttccttcggaaatccatccggatacgttggaagcggtttcggagatatcacacctgcaatctcccagtgtccgatcgttgtatcttttcctctggacttttctttcatccgtgcgtatgcgccgatcggatgcatctctttctccatatagtccacaccatcgatgttaaaaagcccgatcttcttcatattcggagtatcatactcttttactccggtaatcgtctttaatgtattcgctccgacatctccgaaatcagctgcatctgtcatctctccgattccgtaactgtctaaaacaatcagaaaaactcttttcttttccattttcatccgcctttcacttttaccaattccgcttcttctatatttcacattttagacagtttttataatcaaaaaaaggactggagtcccattttcttatattacttttatttttcctcaattttatttctattttcgtttttttatcgttcgatttgcacaaaaactgcccgacggctttgatttttatcaaatccgtcaggcagatacttttttattgatctgacatcctattctgcttcatcaattgcttttccaatatcatgacgcatatatttgttttcaaactgcacccactctgttgccgcataggcattggctctggcttctttcaagtcttttccttttgctgtcaccccgagcacccgaccgccgtttgtcacgatctgtccatcctgaacctttgttcctgcatggaagcaataatacccatcatgttttgaaaattcttccaacccatggatcgggaatcctttttcataattcaccggatatccattggaagcaagtaccacacatactgctgcattgtcttcgaactgcagatccacctgatccagtgttccgtcaatgcacgcttccacaacttcgatcaaatcgttcttcatacgaggcaggacaacctgcgcttccggatccccaaaacgtgcattgtattccaatacttttggtccttcctctgtcagcatcagcccaaagaagatcactcctttgaattctcttccttctgctgccatagcatccactgttgcctgataaatatgctcgttgcagaatgcttccacttcttttgtataaaacgggcttggtgaaaatgttcccattcccccggtattcagtccggtatccccatctcctgctcttttgtgatcctgtgcagaagtcatcgtcttaatggtctttccgtctacaaaagaaagtactgaaacttcacggcctgtcataaactcttcgatgaccatctcatttcctgctgttccgaatttcttgtccagcataatggtctttacgccttctttggcttcttccagattctgacagatcagaacccctttcccaagagccagcccgtcagccttgagtacgatcggaaattttgcagtctccagatatgcgatcgccgcttccggatccgtaaaattctcatatccggctgtcggaatatgatactttttcatcaaatcttttgaaaaggctttggagccctccagaattgccgcatttttccttggtccaaatgtacggatgcctgctgcttccatctcatctacaagaccgccaaccaatggatcatccattcctacgatacaaaggtcaatttctttttctttggaaaatgcaaccagtttttcgaactccatagcaccaattggtacacattcggcaaattcttcaatccccgcatttcccggtgcacaatacatcttttctactttttcactttttgcagcaccggctgcaatcgcatgctctcttccgccgcttccgactattaaaactttcatggcagtctcctcttctactgtgtgaccacagtcttcccgtcttttactgttacttttccattggcgatcagatcgatcgcacggggcaaaatcttccattctgcctgttccattactctttgctgcagaatctccggtgtatcccccggctgtgtctccactgctttctgtaacaggatcggaccggtatcggtaccttcatccacaaaatgaaccgttgcacctacgaccttgactcctcgctccagcgctgcttcatgtactttcagtccataaaatccttttccacagaaagaaggaatcagcgatggatggatattgatcatacggttgcggtatttctcgatcattgccggcgggatcacaacaagaaatccggcaagcacgatcagatccggttcatatgtatccactgtttccaaaagctttttattaaaaatctctcttgattcaaattctttcggcgaaatacagcacgccggtattccatggttctttgcccgctccagagcataggcattggcattattactgatcacaccgacaatttctgcgttgctgatcgtaccgtccgccacacggtctataattgcctgcagattggttccgcctccggaaaccatcacaactactcttagcataaagtaactcctttttctcctgcttcgatcttacctactacatatggagtatctccggctgccctgatcgcttccattgtcttctccacatctgccggatctactgcaagaaccatgccaagtcccatgttaaaggtgttgtacatcatctgttcttcgatgtctccttcttttgccagcatatcgaagatcggaaggattggatagctgttcttttcgatcactgcatgtgttccttccttcagcatacgtggaatgttctcatagaatccgccgcctgtgatatgactgcatgctttaactgtcacacctgccgctttgatgctcttgagtgcttttacgtaaattcttgtcggagccagaagcgcctcgcccaatgtacagccaagactttcatgatatgtctccagattttcttttgtcatctcaaatacttttctgaccagagagaaaccgttgctgtgtacgcctgtagatgccataccgatcagcacatctccctcctttaagttttctcctgtgatcatctcttttttgtcacagacaccaactgcaaatccggcaagatcataatcctcttccggcatcagtcccggatgttctgccgtctcaccgccgatcagcgctgcttccgactgtaagcatccttctgccacaccgctgacgatggaagcgatcttttccggatagttctttccacatgcgatgtaatccaggaaaaataatggttctcctcctgcacatgcaatatcattgacacacattgcaactgcatcaattccgatcgtatcatgcttatccatgatcattgccagttttacctttgtaccacatccgtctgttccggaaagcagtaccggttcttccatctctttgatctttgccagagaaaaggctccggaaaatccacccaagccaccgagtacctccggacgcattgtcttctttacatgctctttcatcagctccactgatttataaccagcctcaatatccacacctgcattcttataatccataactattctccatttcttacatcgtctgtgctctatttttccagatacgcctgatatccgatctcgtccagcttttctgcttttttctgaacggtctctttcatctcttcagaatatgctttgagttttttcaaaacttcttcatcggatgttgccagaatctttgcagccaggattgccgcattcattcctccatcaatcgcaaccgtagcaaccggaattcccggtggcatctgcacgatggaatacagtgcgtccattccgtccaggttctttcctgacatcggaacccctacaaccggcattgggaagagtgctgcacacattccagggagatgtgctgccattcctgctcctgcgataattactttgattccttttccttctgcggcctttgcccagtcaaaaaatacatccggcatacggtgtgcggaaatgatcgtcatctcgtaatcaattcccagtttttccagcatgtcagcagccttgctcataaccttaaggtctgagtcactgcccattacaattcctacttttggcatatcttgtccacctttctcaacgtttcgtatattccaaatctgtctctaaaaagatccgtccgacatctgactgcccacaaacacgaatcttccgtccttcaatagtataatattttttccttcttttgttaatacacttatttcttctaactcttcataaggtgtggttatatctaaaccatactgattcataagctgagctgatttttcttcaaacaactgcacccattctttttgttcttctgtataagagatcccatgagaaagaatgccttcctccagcctttcggaaaccagatcaaaccggatacatcccgctgcacagactgtccactctttttcacattcatatccatgcttcatcacatccagttttctctcgatatatttcttatctaaaaacagcgcctgatccatcctgtgatctgcatcatattgcctgttcacacctctgcctgtacacggattcacgatcactcctgataccggtctgcagattacaggatggattcccagcttttccagttgatctgctaccgcccggatcagttgttcgaatcctgtccgatacacgatctgcaccaggttttttcccttcctcctgcatccttcctgatatcgtgccgtatatttttccgctgttttctgaagatcctcttctgaaattccgcgaaaccactctgccatttcgatttcctgttttccaacgtaatctccgaaaaaatataaaaaccgatcgtctgaaaaatccatatttctgatctgatcaagcattgtacctgcagcattcggattcacagactctctgagataatctgccagaaatacatcgcagtaatcgcttgcataccagtatatgatctcttttacagacttgtattccggctgcccctctgcctcaaaacactgataaacctccagaaacagttcatgcaagatcgtcagataatcctgtcggttctcaaatgcatacgggattccactacgcagctctgtatacaaaaaactcaggagccgtccatagccttctgaaagtatctccactgcatatgccggatttgcaaaactcttcctgtagttttctcccagaatctctacgtacagctcctgattccacaatttccactttttctgaggaattgcttcttttcctgtatcttctatcatttttcgaatggactccaactgaagcagaaaatcagcacacattctaaaatacgggcgatactgttcttttacagtttcttcctgcctgatcatctgcagtctttctatggaaagctgatgccgttcctcacactgttcatttctctttttctgccacgttttctgttccatttatgaaaatcctcctaaaaatatcatgaccaaaagcaacagaatcagcccgttcagcaaaatccccagccagcttgtcatatgctttttttccggctccagccgccccttaagtcctgcgcggattccaaggatcgtgagcatcatatcgatcaggccgattgctcctgcaattgccgccgtatcctcacgccttgtatatgcatgaaaaaccagcagtgcaaggatcagcaatgaaaaaactgcatatatacaggaatgttttccctgatttgcctgtcttatgttttcttttttctctttcttttccttattttcttttctttctgctgccattatattttctccttattccattgcagatcaaaaatagtatatatcccaaaattccgcctgttgtattcaaaagcagatcatctacgtcaaagctgcccactcttgtcaaaagctgaaacacttccacgccgaggctcagtccaaagctgtaaaacaaggtcatccaaaaacctctcattctgctggcaacggatataaaaaatccatatggcacaaaaatcagaatatttccaaataaattagtgaataccgcgaaaagccccagcgtttcccggtattccacaaaacgtctgatttcccggaacagtacaagattgcagcgatattcttctccaataccgctgcggccgtaccagtctgaaaaaatcagaaaatataataagaaaaaaatgtagagcacaaacaatattttccccactgtgcgggttcttttcacctgtctctgattcaaaccattccctcattttccacgattaaaatgtaatttctcttttatttttcaacagacgtgcaccattgacaattgcgatcacaccggctgtcacaccggttacaattgtaatgatcccgatcacaatgcttcctgcaccagcctggtgcattgttttatatgctttttccatcttctttcactccttgcctactttacaccatacatttcataatatgcatcaattgctgcttttaatgtatcatcaatgatcacttttcctttgtatggtctattgtagagatgctctacgacttcttccatcgtcacaatggccgctgtttcgaatccgtacagatctttcacttcgtccaacgcacatttttctccgccttttccaacttccatacggtttaatgacaccatcagaccgacgatttccacatctgcagcaccttttacttttggaactgtctcttccatggatttcccggatgttgttacatcctcgatcatgaccacacgatcaccgtcttttaatttacttccaaggaagcttcccttgtctgcaccgtgatctttctcttcttttctgtcagaacagtagcgcacttcttttccgtataactcgctgtacgcgatggctgttacaacaccaagcggaatccccttgtaagcaggtccaaataacacgtcaaaatcgtccccatatttatcgtgaatcgcttttgcataatactcacccagtttctttaactgagaccccgttacatatcctcctgcattcataaaaaacggagattttcttccacttttcaatgtaaattctccaaattttaatacgtcactgtctaccataaactcaataaattcctgcttatactgttccatatcttttcaccctccatatcgacgggcacatacgccctgataaatctgctttcttatttgacgatcccaatcatatcctgcacactcgcaaaatgattctgctgcatatatcttccgatcccgtctacgatttccatcgttacctttggattatagaaattcgccgttcctacagacactgcacttgccccgactaacagcatctcgatggcatcttctgccgtctcgattccgcccatgccgatgaccggcacacttactgcattggctgcctcatataccatgcgaactgcaatcggatgtacggccggtccggaaactcctccggttttattagccagtgcaaatgtcttgcggtgaatgtctattttcattcctgtcagtgtattgatcaacgaaaccgcatctgctcctcccgcttccacggctttcgccatctccgaaatgctggtcacattcggactcagtttcataatcaccggctgctttgcatatttttttacagctttcgtgatctcttctgccgcctttggattctgtccgaaggcaattccgccttctttgacatttggacaggatatattgatctccagcatatcgacatcttcattcgccagacgttctaccacttcacagtagtcttccgtagatcttccacaaacattgacgatgatctttgtatcgaactgacgcaaaaatggaatatctcttttacagaatacatcgatccccggattctgcaaaccgatcgcgttcatcattccactgtggatctccgccactctcggagtcggatttcccggccatggcacgtttgcaaccccttttgtagtcactgctcccaaacggttcaaatctacaaattcgctgtattcttctccagaaccaaatgttccggatgctactgtcacgggattgttccactcaaccccggcaatctttactcgcatatccattacagttccacctccgttgccaaaaataccggaccgtctttgcagacacgcttgttgtgtacatgactgtggtcatctacttctttggactggcagacacatccaagacatgcaccgactccgcaggccattctctcttccatggaaagatagcactctatgtttctctctcctgcatactgtttgatcgcgcgcagcatcggagtcgggccgcaggcatagatcacatctgcttccagatcatttgctgcaaccgcatccataacatttccttttgttcctgtgcttccatcttctgtagcaatataaagtgttccattttcttccatctctctggtcaaaaatgtctcgctccgatatcccattacaagctgacattccgtctgatatcctgcctgtaactgctttgccagttccagcatcggcggcacgccgattccgccgccaaagagcagcgctttcttttctcttccggtctccagatcaaatccgtttccaagaggtcccattatttccagtgtatctccctctttcatctgtgaaaactgctttgttccggtattttctcctgtcacacggtacaccacgcgcagtgcaccgttttctttgtcaatctcacacaggctgatcggtcttgggagcagttttgcaccatcatttgtatacatggaaataaactgtcccggaactgcctctgccgctgctggctctgctttcagccacatactgtaaatatcttctgcgatcttctcctgagagaggaccactgctgtcattttctgtttcttagacatgaatcttcctccccggtacttatcttgcttctaatgctccctgaatatctgcaaccatcgcctcaactgctgctctggaagcctctccgaagttctctgccccgaattttgcgtatgcttcctgcttataagccgcaatgattcctcttgaagagttcacgatcgcaccaagtccgtcttcattgaagaagtgtaccaggtcttttccctgtcctccctgtgcaccatatcccggtaccaggatataagatttcggcattactttacgaagtacttttcccatctccggataggttgctccgacaactgctccaatatagctgtattcgtctcccatacagtcagcaccccactgcgctactttttctccaaccagctcatacaacggctttccatcgatcagctgatcctggaattctccactggatggattggatgtctttacaagaataaacagaccctttttgtgctctttgcagacatcgataaacggattgacaccatctgatccaagatatggatttacagttgcaaagtcttcatcaaacggaacatactctttgcttcctactttcacacttccaagatgtcccactgcatatgctgcagaagtagaaccaatgtctccgcgcttgatgtctccgattacaaccagatctttggatttacaataatctactgtctttttaaaggcttcgattccaggcacgccgaactgttcgtacatcgcgatctgtggcttcactgccggaatcagatcgtatgtcttatctacgatttctttgttgaactgccagattgcttccgccgctccttccagtgtctctccgtattccgcgaatgcttttttctgtacatgctccggaatataatttaacatcggatctaatcccaccacgatcggcgcctttgtttctttgatttttgctaccagtttgttgatcatttttcttcctccctattctttaaaaagggacagaactcgattctgtctctttatttttcgtatacaatcttcccatctgccaatgtacagcagacttctcccttgaccttccatccatcaaatggcgtattctttcccttggatgcaaaggtgctcacatcaatctgatattctcttcgcggatcaaatacaacgatatccgcctttttccctgctgaaatactgcccctgtcttccagtcccagaatcttcgcagggttatagctcatcttctctgccatctgcatcactgtaagtacccctttttctaccagctctgtataagtcagacatgcactggtctcaagtcctacgattccaaatgcagatttttccatcggcttgtctttttctgacatcatgtgtggtgcatgatctgtagagatcacatccatcacgccgtcttttaacccctgtctcaatgcctctacatccgctctggaccgcagcggcgggttcatcttccagattccgttattctccggaatatcctcatctgccagaataaaatggtgcggacatacttctcctgtcactttcagtccggcctcttttgcatctttgatcatgcgaacactgtctgctgtagaacaatggcataaatgcagcgtagcatccagttcttttgcgatcaggatatctcttgcaacgatcacatcttctacagaatttgtgattcctttgacccccagttcttcagcacgctttccggcattcatcacaccgccttctaccatggaaatatcttcacaatgcgaaaagatcagcagtccatgttcctttgcttttttcattgcctgtctgaacaacgaggcattcatcacagactttccatcttcactcaatgcataacagccagcctgtgccattccttcaatatcagaaagctctcttccatactcactcatagtcatagaacccagctggatcacatgtatcggagattcttctctggcacgtctgtgaacctcttctactttttcttttgtgtcaatcaccggattcgtattcggcatcgcacatactgttgtcacaccgcccctggctgctgccctgcctccagtggaaagtgtttctttttgagtcagtcccggatctctcaagtgtacatgcagatcaatgaatcccggcatcacatagcagcctgacgcatcgatcactctgtcagcttctgcttccagatttttttctactttttcaatgtctgtatcgtgtacaagcacatcacatacttcatccacacctgtcataggatctacaacatgtccattttgaattaaaatcttcatacagtacgttcctttctttgttcattttaaagagcgaatttcccttcaccgaaaaaatcacatatgtatatttataataacataaaatacgggaactgcacaacaaaaagaaaaagtgtgttgtaaaatacatactttctttctgtccggaacatactattttgcgaaacacaaataaatctaatattatgcaaaggagatactaccatgacagagatttcaatcttagacctgcaaaatctccgacatctgatcggaggctattctaccactcactgtaaaatgacagattacgctgcacaggcaaccgaccccgaagtgaaacagttatttcaggaagctgcagactctgcgctcaaaaacaaacaggatctgatgaaatttttataagggagaacgaaaacaatggacgaaaaaacaatggtatccgatgccttagtcggagtaaacggagaattaaaaatgttcggagacatgattccgcagacagaaaacaaagaattaaaacaatgcctcaaacaaatccggaatcaatgtgaaatgtcacaggaaaaactgtatcaggtggcacgggaaaagagttactatgtacctgccgcaaaagcaacacagcaggaagtggatcatgtaaaatcaatactgacacagcctaaaataggtctctaagtccaaaaacaaagtggccgcagatccgcagccactttgttttcttcttcactatttttccgtaaatttctgatataccgcaataaactcttctgcaatgatccgaaaactttctgcgctcatcagctgatcttctgcatgcatgacaatcattcctgcgctttcaagttcaccacttgcggcctttgcaatcagatccgcatggacatgatgtccttctgcaaaagcctcatctccctgtttgatcagactttctgcctctgcaaaatttcctgcctttgcgctttggatcgcattgacaaaacagcttcttgccgttcctacatatgtaatgatctgaaaacacgccatttctaattcttcattcatcacagatcctcctttcgatctaccaatcttcatcctcatcttcttcatttgctgtttcctcagcttttacattcatcttatccactttgcgtataaatggcaagtataccaaaaaggaaagaatgaagattactacctgaagcaatgctgttctccagccgccaatcaaaaatcctgaaataatcggcggacaggtccatggaacttctgtcgcaccatacaagggacagattccaaaatataatgcagcatactgaaccacacaggagatcagaggcattccgataaacggtactgccagcattggattcataacgaccggaattccaaataaaatcggctcattgattccaaacaacgccggtaccagttccagtttcccaagtgtttttaactgttttgattttgcaaatgcaaccatatacatcaccattccgatcgtcagacctgctccggtcacattgataaactgatcgtaaaactgctgtgttacaatatgtccgccgtttgcaacggtcagcgccattccgctgtcaagaattgcctgatttgccattccgttggcacgcagcaatcctgtcataattcctccaacaacagtcgaaccatgtactccaaacaaccataagaatggacctgcaaaacacatcagcattgcaccgcccagagaatctgtcattccctgaagaggagtctggatcacatcatagatcgcatccatcaccgttgtatggaatccaagagaggcaattccatgagcaactgtcgctgccagaataatacatgcccccggaagaagcgcagaaaacgcatttgacacacctgccggaactccctgtggcattttaatccgaatatctttcttcaaaaaccaggagtacacaaaaccaactacaagtccaatgatcaatgctccaatcattccctgtcctgcggtccatgtcttattgatcacccctgatacaacctctccactttccgttgtaacagaggaaggcatcagcaaaataaatgtaccaagtgcaaccattgccccgcccagtggttcctgaccttctgcttttacataattataactgataccgatcacggcaatcatcgcactgatattaaacgttgccccatatgcctgatccaggaccgatttgatacctgttgcctccaggaaatctacaactgcctggattggaaagttcgaaagaatcaaaaagaaggatcccacgattaacagcggcatagaataaatcataccatctttgattgcctgtactccctttgtgttgataaacttcataattttcgggattactttttcattaaaatatttccccattgctcattcctcctcattcctgtttttcggacgccctctatttgttgtttttcgccagcttgtacgcaaattttaaaacattcattccattacacattccataatctgtcatcgggattacatcgaccgggacattctttggtccgcagatttcttttgcttttgcaagttggaatccaacctgcggcccgagaagagccacatcaacaccatcgatcaaacgctccatctctgaaatcgggaatgctgcaatatccgcatctttccctttttcttttgctgcctcctgcatttttgaaactaacagacttgttgacattcctgctgcacaaaataaacggattaccatcattttttcctcctgaaattttatttttatttaaagcacttctccattgctttcaatcacttttttgtaccagaaaaacgaatctttttttcttctttccaatgttccatttccctgattatctttgtctacatagataaatccataccgtttttccatttctccggttcctgcacttaccagatcaatgcacccccacggcgtatatccgattacgggaataccatcctccaaaatagatttcttcatctcttcaatatgcatcttcaagtattcgatacgatatggatcatgaatgccatcctcttccactgtgtcatgcgcaccaaatccattttccacaataaacagcggcacatgatatctctggtgcagaagattcagagaatagcgcagtccttttggatcgatctgccatccccagtcacttgcttttacatatggattttgggcagtgtaatatccatcggatactttgatgctgttttctacttctacactgctgatcgtattactcatataatagctgaagccaatataatctacgcagccttcttttaagatctgtaaatcttctgctgtcatatccagctcaatcccatgctgtttccggaacgcattcatgtatgccggatattccccgaacacatgaatatccccataataatatagtctgtgttccattgcaacctgcgctgcccacacatcatccggagaacaggttctcgggtaatacggaaccattgcaagcatacatccaatctgaaaatccgggttgatttcatgtcccagtttcacaacttttgcacttgctaccatttcataatgtaccgcctgctgcaatactgtctgtacgtcttcatcctccctgtaaagaattcctgaattcgtccatgcatgccatttagatgatacacatccctgattgttgatttcgttgaaagtcatccaatatcttactttatctttgtatcgcttcattaccgtttctgcaaaccgaacaaagaactcgatcaacttacgatttcgaaatcccccatatttttctaccagataatacggcatctcaaaatgacttaacgtaatcacaggttcaatctgatatttcaacaattcatcaaacatatcgtcatagaattgcaatccttcctcattcggttctgtctcatccccgtttggaaaaattcttgtccatgcaatggaagtacgaaaacatttgaatcccatctcagccatcagacggatatcctctttatacctgaaatagaaatcaattgcttcatggtttggatagttttttcccggaaggattccatttgtaatctgtcgttcaattccattcgctcccgccgtcatcacatccgcaatggaaagtccctttccgccttcccggaatcccccttccagctgatgtgcagccacagctccgccccacagaaaatcatccggcaacatttgttttttcatcttctcatctcctttatataacaagccatccttcatctaccgctcgggcaaaatcccagtcatttcttcccggtgtatgcagtttataactccagtaaatccagccttcgcatttttcccatgcgttcagctgcatctcaccgaacatccggtaaattcttcttttttgttctgcttctgctgcgctgcgaatcaaatcactcttattggcaatacaccactcgcctactactacatcatgaaattgctgcgctcttacaagtcgcttttcaaaggactcttctacatatttctgataatccgaaaaatgtttccctttgatatcggcttcactgaaattcagatacatatgtgtatcaatcaccacatttggataggattctctcggcataaaattttcccattcttccagtcggaagccatcgtgaagcacaactttaacgcgttctccgcaatgtcggcatacccgctcatacccctttaagtaaaactccttaagaacctctgtcggaacataagtcgatccttctgcacgtttgggatctcttggtctgtatcgctctttattgatctccagtacttcctttgaaacaggttcattgagcaattcaattccataaagaccttctctgtccgcataacgttctgccaatttttccagtacatccaatgtatattctatgttttcctgtttcaaatgccattttacaacacctgtaagccctccattgtcaaacccgttctgactgtccggtactgtatgcagatcgatcataatctttaaatcatattgttctgcccagtcaaatgctttatccagatactcaacacatcctacatatggagctctgtctccaaaaataaaatgcggaaccggaattcttacaaggtttaatcccattgctctgatgtgctgaaaatctctttcctgtataaaataatcccgatgcattcgaattcgtaaagctgcctcttccggagacaacatcgtataaaagtcttcttcatcttctgcctctgtcccatgaaacagctctgaactcatccacttttccaaaaccagccagtttcctagatttacaccttttactttcatttttcactcacctcttctgttgatatcgatactatacaaaaatcacattttattttcaatctttttgtatattttgttgttgcgtttcattttttctgaaacaaattggtatttttttgcaacagtgtttcacacgtaaaattttcatcttcttttttgtgcaaaataaacaggtcttttttggttatttcttacaaccaaaaaagacctgtattttcctcacattgtttatttttcttccaatccccagagacttttttctcctattttttcatatttttgattcaacatcagattttcctgatattttctgctaaattccattccatataaaatatcaagaatatattttcccgaagcaaaaaacatggatgtccaaaactcttctaccttctccgtacccgatgctgtaagtacctcatccgcatatttcgcaatgatcctgttttcttctgatacaatcgcaatcaccttggttccattgtttctcaatattttttcaatttccaccaaccgttcattccttcctgtatgacttaaaataatcgccacatgcccatcagaaggcatattcgctgaaagtccctgaatattggtcgcagaataaactgccgcgcgttttcctgcatgaaaaaacaacgaacatccatactgcgcaagattgacattcatgtcatatgcataaaagtccacacaacttgcctcagcaatcatcttcccgactctgatcaactgactgtaagaaatttccttttgcgtttcttccactgcccgtttctgaatttcggttactttccgtaccattgtcacaacattttctctttcagacagcaaaactttcttttcttctattgccagattgccagccctcaattcactgacaaatttaatcttgaattccggaaatcctttcatccccatttttttgcagaatcttgtaaccgatgctgcactggtaaatgtctgatatcccaactcccgcgatgacatattttcgatcatttccggatgttccaaaacaaattttacaatatccttctcccgctctgtgagttcctgtgcctgcttcaactgctgaatcaacgacatattcttccctccctcttttcctcttgttttatcttatcgtatgccgacaaacacagtcaatctgtgtaataaaaaaatcagaaaacgttcttctgcagatgctgctttgacacattttctgatttttctttttactcttcgatctcctcctgggtcaaactcaccggatcagtactttcctgctgcaatatctgcataaattcttcccctgtgatcgtctcattttcatagagatacttggcaagctcgtgcagctttgcctcattttctttcaagatctgaagcgcttttgcatgggcctgtctcacaatctctacaacctttgcatcaattttcgtctgtgtctctggagaacaggtcaaagaagcatcgcctccaagatactgattctggatcgtctccatcgccaccatatcaaactcatcgctcataccgaattgagtcagcatcgctcttgcaagcttggttgcctgttcaatatcattggatgcgcctgttgtcacctcctgaaacacaagctcctctgctgcacgtcctccggtaaatgttgcgatcttattgagcagctctgattttgtcatcagaaaatgctctccctcatctacctgcatggtataacccaaagcgcccgatgtacgtggaatgatcgtaatcttctgtacaggtgcagaatctgtctgttttgccgctaccaatgcatgtccgatctcatgataggcaaccgtcagtttctcttttgtagataaaatacggttcttcttctggtatccggcaatgactgtttctacgctttcttccagatcttcctgcatcgtgactttgcttccgcggcggaccgcacgaagcgctgcttcattcacaatgttggcaagctctgcaccggacgcacctgctgcagtccttgcaaccgctgcaaaatctacattatccgaaagtcgtattttctttccatgtactcttaaaatttcttctcttccttttaagtccggaagctctaccggaatcctgcggtcaaaccgccccggacgaagcaatgcaggatccagcgaatccggctggttcgtagctgccaggatcacaacacctttcgttccatcaaatccatccatctctgtcagaagctgattcaatgtctgctcacgttcatcatttccacccatgtttccatttcgcttctttccaatcgcatcgatttcatcaatgaacacaatacacggtgctttttcattcgcctgctggaacaaatcgcgcacttttgctgcacccatacctacgaacatttccacaaattctgaaccggaaattgagaaaaacggtacgttcgcttctccggccactgcttttgcaagcagtgtcttaccagttcccggaggtcctaccagcagtgcccctttgggcattgctgctcccatctctctgtatttatccgggtcatgcagataatccacaatctcactgagcagttcttttgcttcatcctctccggcaacatctgagaacttgattccattgctggacttcacataaatcttggcattgctctttccgcctccgaacatcatcgaattcatcgggttcgcaccgccgttcattttggacatcatctttttcgagagccatcttccaagcatgataaaaataccaatcgggagaatatagctcaataaaaagtatatgatcggcgacatctcttccgtgatctcagatgaaaagtctgcgcccgaacgataaaggcgctccaccagtcccggatcatccatcactccggtcttatacactttctcttcacttttgtctgtaaaaacaatctctccgctgtcaatattgacctttccgatctccttatgttctgtcatctgcataaatgtattgtagtctacttctttcacagagtgcttcagtacattcggaaataccaggctgttcagcaaaaccatgatcgtcactacgatcaggcagtaatacataaatggttttttcggtgattttacttcctgcatatccttcttccctcctgtcacgataagctaagttaaaaggtagtatagtcgagctcttttcagaagtcaagaaagtttccctctcctttgagaaatttcatttttattttatgtttcttttatttttccgatgtattctgtccgtagtacgcatttgctccatgctttctataataatgcttatcctgcagttcctgtggtgcaggtgtattctccggattcagccattcacttctggcagccatttttgccacttcttctgtcacgaccgcattgtgcactgcttcctccgcatcttttccccatgtaaaaactccgtgatttttacacagaactgccggaactgccagataatctttttttcgcacctcaaactcatctgcgatcagaattcctgtattcttttcataagcttcttctatctctgccttggtcaggtttctcacacacgggatttctccgtagatgtaatctgcatgcgtagttccatagcagggaatatctcttccagcctgtgcccagctggtagcccaggacgaatgcgtatgtacgatgcctccaattttcggaaaacgatgataaaggacaacatgtgttggtgtatcggacgaaggattataacgtccttctactttatttccgttcagatccacaacaaccatatcgtccggcgtcagtttgtcatactctacaccgcttggtttgatcacaaacagacctttttcccggtcaatcccactgacatttccccatgtgaaagtcaccagaccatattttggaagctgcatattcgcttcatatacttcctgttttaattgttcaagcataatcagatgctcctttccctcatagactcttttattcatagtataactttttctgtcaaaataaaagtctttttcagtatgaaaaaagaaaaacatgcagctcaccatctctgatgcgccgcatgtcctcatccattggttatttccagcactctgtgtttttaatccctgcctcttctgctttaaacactggatttttccctgcttttttctgtgtttcataatccttgagcactttcattgcaatattaccaaggatcaaaattgcgataatatttacaatcgccatgcatcccatcgtgatatctgccagattccataccagagagaaatctgcctgtgctcctaaaaacaccgccagaagacacgtacaacggaatacaaacaataaaatcttattatttttgataaacaaaatattcgactctgcgtaataataatttccaatcagactgctgaaggcaaatgcaaaaatagacaacgtaataaagtggattccccatgttcccacattcactgaaattgcctgctgcacaaacgggatcccgtcgagtactcccggttcaccctgcactccggagagcagcagcatcatcgccgttgcagaacagatcaaaagcgtatcgataaatacagagatcacctgcaccattccctgttttgcaggatgactgacagatgcacttgccgctgcattcggtgcacttcccatacctgcctcattggaaaacagtcctctcttgattccgatcacaactgcgcttccagccaggccgcccatgatcgcctgaacatcaaatgcttctgatacgatcattgccagtacacccggaagctgcggaagatgtgtcacaattgtaaaaagtccgatcaaaagataggcacctgccatgatcggcaccattacagatgtaataaatccgatgcggtgtacgcctccgaagataacaagacctgttccaactgccagaaccagacctatgatcatcggatatacgctgtcgctgtatcccggaatataatattccagagctgaagacatattgtaagactgcagtccattaaatccatacgcaaagcagatgatcagaagtatcgaaaacagaactcccatccagcgctttccaagagccttctccatataataagaaggacctccccggaaatcttttccgtcttttgtcttgtatacctgagcaagtgtactctcaacaaatgccgaagcccctccgatcactgccatcagccacatccagaaaactgcccccggacctcctgctgccactgctgttgcaattcctgcaatatttccggttcctacacgagaagcagttgagatcatcagcgcctgaaacgaagacacctgtctcttcccttctttcacatccgctttttctgtcagaattcggaatccttctttcaacagacgcacctgtgcaaaacgtgaacgaatcgtaaaataaagccctgtacctaccaacaaaaataacaacaggtatgtatacatgaaatcattgatctgccctaaaatgtcatttaacatataattcctccttttctttccctttcgctgttctttcccaaacatgcgtaacgccgatagtataccagaaaatccgtagttcggcaatatcctatcgaagaactacactaataaactgcatgaaaaagccggtgaaaggcaacattttccaccggcttcgtccattattttactgttttcaacaggcgtcctctgaatttactccatatgtgcacctgtacatattcgtaggcccgatcatagatccagactccagcctgaccggcagcgagcactgccaccagaaatcctccggagagctcctttgcaaaaagcagatcttgaaacaccaaaaccatcggaatatacatcccattaaaaacaatatattttatcatccagaagatccatctcttctgcacatttccccgacttctcccaagaatacgaaaacttccctccgctgccagaatataaaatcccatggcggcaaatgaaatcacgtagaacttattcggagtgatcagaaatcccagtaatacatctgccagataaaaagctgctcctgctttcatcccatattcacggatcacaattcctacaaaatacgatgctgcagccagcaaaaataaggtattcgtctcaattacactcccaagagccatacagacaacggaaagtgccagaaacagtccgccaatcgcaagcattctcgtttttacatgcatgaacaaagatcgcctcccatacattcacacaaggagtctgcacaccagagatcacagcacatatttccggttccacagctctgtccgcccgcaccatatgcaccgccatatggattgctctgatatcttctgctgttccagtccagctggtttaacaactgacgatactggacattattcggttccatattcacagcctgtgctgcatgctctcttgcaagtacattatttccgattccggcatttgcaaaaccacttgcataataccacattgcatttcggttcggcatacgatccaaaagattcagcgcctctctgtagcgtctgctattgataaaattgaatactgcctgcatctctgtatcctgaggaccattgtacgtattgttgtaagagcctcctccatatgaggatccgccataagaatagccgcccccctgctctctctgacgcatgatctcatcatacgcctcctgcacttctttaaatttctcttccgccagatccgcaagcggattgtttacattcgcatccgggtgatattttcttgtcagctcccgatacgctctttttatctcatcatctgatgcactctgcggcacgcccagtacatcatacggattcttactcatttttctgatttccttcctctaacttcttcttctgaattttattataacgattccagactccatcatacaggatatttctcaaaatgtccacatccaaaaggcagggcagcttctcaaactgcgcactgcactctgcgatcatcatacagaggatctgccgcatctgctcttcatacccatccttttcatgcagtccggcaagcggattgtaacactttttcttcaaatcttcctctaaatcctcatatgcatccatgatgtatatgtactttccaaggaagaatcccatacgccgcagtgtttcttcccacagatcttcctgatacacaaacaactctgccatcagacgtccaaaacatcctgccacaatgtcaatttcctgactgtttttcttttcacattctgaaagttcctgcagagattcccggattactttactttgtctcggatacttttccgcaattttttctgcttttttcttcagcaatcctcccccgaccagaccactgactttcttctcatcttcccagtcatctttcatgtgataatacgccagcagaacattcatatctgctgcatactgtgtgatctcattctcgatcatcgcctgttttttcaccggatgcactttgcatctgtgccggctcatctgattctggctttcatacaaggatgagagcaaaataatcgcaaatgtcatatcataagtcagagtcatctgtcccatcgtcccgtaatcttcttttaattttcggcagagcccacaataatacgccttatatttgcgcaggtccttcattttcagttccggttcacagattgtcacataaccaaacatgctttccctcttctttcgtaacatttccaaaatacaggatgatatttattatacgcattttatacaaaaatgtacagacaaaaacagacaaacgcttgtcaaaagcgtctgcctgcctcttgtctacagcatctctgcacgtaattcttctccactcttcggactcaaatatgccggtgcaatgtcaaacaccgtcttacatcctgtctgaccttcctgatgcagacgatatgcggctcttgcatatgccacgatcacggaagaggtaaactctggattggaatccagtttcaggcggtattccacgagatgtttgttctctttttcccaaccggtcacaccacttctgagtacaaatcctccatgtgggatcccactgtgctcggcttttaattcctcttcactgatgaaatgtacggttgtatcataatctgcaaaataattcggcatagtcttaatctcttcttcgactttcgcagcatctgcaccttcttccagcactacaaaacattctcttgtatgtttctgtcgtgttgtcagttctggattttcaccatttcttaccgcttcgagtgcatcctctgccggaatcgtatactgttttgcatctttgactccttcgatccggcgcaccgcatccgaatgtccctgactgacgcctttcccccagaacgtataatcttttccttctggaagcaccacatttccatacagtctgttcaaagaaaacatacccgggtcccaacccacagaaatgattccgatatgtccgctttctttcgcagcttcatccacatttgcaaagtgctccggaattctggcatgagtatcaaaactgtccactacattaaacatctttgcatattccggtgtctgtactggaagatctgtcgcacttcctccacacaggatcatcacatcaatcttctctttccagtcagcagcatctgcaatgttgcacactgcggctgtcttcgtcaagatcgtcacatcttccggatttctgcgggtaaatacagccaccagttccatatccggattctgtctgatcgcgcattccactccgcgtcccagatttccatatcctaaaataccaattctaatactcatcttttttctcctttgcactttgtattttgttacttattataatctccatgctctatttttcaagtttttatttttgattttttgtattttttcaaatcccatttttatgcctgctcatcataggattccagaaaatgatgtttgactccgttttccttgtatgcaatcaccgtactcaaattgacattttccacactcttaaagatattcccctctacatacgggttcgtttctttcagttttgcgatcaggtgcttgatctccatccgtttggatgcactgcttccatccgcactgcaggtactgcatgtctcagtaaaacggcaggcacactgcaaaaaatgcagctgattataatcccgccagtgcttgatatcatcttccctcaccaaatataatggacggatcagttccatcccttcaaaattggtactgtgcagcttcggcatcatcgtctgcacctgtgcaccatacaacattcccatcaggattgtctcgatcacatcgtcataatgatgccccaatgcgatcttattgcatcctaactccttcgccttactgtacagatgcccgcgccgcattcttgcacataaataacacggtgatttttccacatcaaaaacagcatcaaaaatatccgattcaaaaatcctgattggaatccccatcattcttgcgttctgttcgatcagtttccgattcagctcgctataccccggatccatcaccagatattctacctcaaatggaaacttgttatgcttcttcagctcctgaaacagctttgccatcaacatcgaatcttttccaccggagatacaaactgcgatcttgtctccctcttgtaccaattcatattctcgtattgcttttgcaaaacgagaaaacaactttttatgaaatttcttacgaatgcttttttcaatctcctgagcgcgcaatgcatcttcgtttggatcttcctcttcttttttctgctctgcttccattctttccatcagccatcgcgtgtatccgccttccagactgtatgcttcgtacccttcctcacgcagggcctctgcacattcctcgctcagcacaccccgaacacaataaagcaccaactttttttccttctccggagtcgccaacttctgtcggatctcctccgatggtatccactctgctcccggaagcatcccatacgctgcagaagcctcatctcgaatatcgatcaaacggtaagagccaccttgcatggatatgagatcctgatattgtatattccatttattatccattgtatctcaatctgtcctttctatattcctaccatagaaataagtttaataaccgtttttattatacgggtattccaaacgattgacaagtagtagttttatctcatataccggctttttctgccaaaaatactctgctccgtatcaaactcaaaaatcaacaaaaaaccgcaggttcacatcatgtgaacccgcggctcttttctcaaaatcggagtgacgtgattcgaacacgcgacctctacgtcccgaacgtagcgctctaccaagctgagccacactccgaaataagataagatcactcttatcttataactacggatagaggactcgaacctctactaacagagtcagagtctgctgtgctgccattacaccaatccgcatcacctcatgtttcgtctctgtcagacgcaacatggttattatatccatatgtataagaaaagtcaatacttttttttagtttttacaaaaaatattgtgtgaattcatatttttcattttcatctgtctccagaatgatataacttccttttctgccctcttgtcttggaaaagacagacttcccggattcagcaccaccaccccattctgttcttcaaaatatgggcgatgtgtatgcccaaacatcacaatatctgcatttctggcaattccttcttcccggatcagctccgtctccattgaaacataataactgtgtccatgtgtaataaacgcctttttctttccaatccagaattcttcttctgccggaagacgggagaaaaaatcattgtttccccttacgatatgtttttcacattctactactgcctcaatataatcttctccgccttctacatctcccaaatgaataaacatatcaatctccccggctgccctgagcgctctgtcaagatttgtatgctttccatgagtatcactgacaatcaacaccctcataaaaactcgcccctctatttctcttttctttccataaccatacgcatagcacgtaacgcgcgtcctctgtgactcagttcatttttctgtaccgggtccatctctgctgttgtacatccatattccggaacataaaaaatcggatcataaccaaatccatgttctcccgcgatctcatgtccaatgattccctcaatcgttccacgcacagtctccacgcttccatccggaaatgctgctgctatcgcacatacaaatcttgctgtacgtttttcatccggtacaccttccaaccggtctaaaagcatctgattcttaatatcataagaagtatctacgcctgcatatcttgcagaataaatccccggctctttgttcagataatcaatctccagaccggaatcatctgcaaggacaatatcatccggcagatatttcgcaatcgcctttgccttgatctgagcattttcttcaaatgttgctccatcctccacaatatccacatcgatcccaacctctttcatggaatagatcggcatccccagatcttccaggatcatgcggatctcgttcattttattctgatttccagttgcaaaaataattcttttttccatctgtttttcctctatttctttgcttttggtggttttggtcccataaactgataaaaatatgttttaagcattccgttataaatctttctgttcttgtctgcttttcttccaaagtagcgttctgcatcttcatagctcgtgatcatatatgcagaccaggaatccagcatccggaaacttgccccaaaatcagcatacagctttggaagctcctttttgtcctctaaacgttccccatacggtggattcgtaataataaaaccatatctctttggatgccgcaaatcctgcactgccctctgttgaaaatgaatcatatgatccacacctgcatcttctgcattttttcttgcagcttttacaacatctggatcgatatcatacccttgaatatctacttccacatcatcctgtatcagatcggccgcctcattgacagcatcataccattctttctttgggatcagattcgtccatgactctgctgtaaatgaacgattcattccaggtgcaatattcgccgccatcatcgctgcttcgattggaaacgttccacttccacaaaatggatcgaccaaaatgcgttctttattccatggtgtcaacatgatcagtgctgctgccagtgtctctgtgattggcgctttactggacagttgacgataccctctcttatgtaaggaaatcccggaggtatcgatccctactgtcacaatatctttcattaaaaataccctcaccggataggatgccccagattcctcaaaccaggaaatgtgatactgacttttcaatctctctaccatcgcctttttcatgatcgactgaatatccgatggactaaaaagcttacttttcaccgatgccgctttggtcacccaaaattttccgtccctgggaatgtagcgctcccatggaatctgtctggttttttcaaacagttcgtcaaatgtgactgcccgaaatgaacccgccttgatcagaatccgttctgctgttctcaaaaatacattagctctgcacacggcctctgcatcgccataaaatgtaacacgtccgtcttctacccgggaaatttcatatcccagatccaaaatttctcttttcagcaccgcttccagcccaaaatgacaaggtgctatcaactcaaatctttccatatattcctccatatgtatctgaatatgtgccttacacatatcaaatatctgtactcatattactataaatcacatctgtagtaaagaaaaggatacgattctgtttgattccgcagatcgtatccctcttttttcttacagctccatctgtcttatgctatcttgcattggacatattttcagtagaatctgtactgtttttatgacagtttttggatgttgttttattggcatttctgctatttttgctgtttttgttctgttcatctgcaaatgatgaatatccattttctgatgcacgattgcctgctgaatttttgttgttttctttgttgctgtaattcttagccatgagtattcctcctaaaaaatttatttggtacacccatagtatttctgttccgcttaattttattcggattttttgcatttttgcttgcattttccaatttcttatattatacttgagcttgtagaaagtagtctttctacaaccccttattaattatttatactcccctcaaaagaccgatggctcccccatcggtcttttacttttctctgttaacgttttttaaaaaactgtacgatcagacatacaaccaaaatcggaacaagaaccggaagaaacagtctgatcaaacctgtgatcacagaaaagatcaaaacaattccaagtatcactgccagaatgaccagtgcgatcttccatttcggaaacttcacttcctgaaaatgcatctttcctcctgctgcgtcatcatatgagctatattcgctgcctccggcttcatttacaatcgaatcatcggtcccgtcctgtgcatctgaaatagtccttgcaagaagccagggatctccaagcatcttgagcacttcctcttctgtttttccgctttgtatttctccttctatataattccgataataatttatattctcctgaacagactgcgcactgacttttccactcagcgctgtacgcaattcttccagaaattctctctgagacatctcttatcctccattccacaatctttttttcattatagcaagttctttttcgccttacaaccgccacttttctgttcataatttgttcatttatcattcaaaattctttcattttcttaacattgtttcttcatttctcttgactatactaaatatatcaaatgaaagaaaacatttgaagacaaaagatgccgcatagtaattatactatttgaataaactttttcataatactcgccaggggccgtaaacacggtcacctggcatcctccctgttaaagggcttttttattttacaaaccagaatttctttctatttcctctcggaagttcccgtaaaatctgatgaaattcccggtacgttttcttgcctctttcccctgtgcatttttgaattaccagtgacatcatcacttcctctttccaggtaagctgtggaaccaccgtcgtatatgccagcataaactgaaatattttccccaggctgtacagatccatgcctgccgcaatattgctgcgtttcatttccgcaggcatcagaaaatgcgcacggacagccggcatctgcattttcttcatgacaaatccattgctctgcgcactcaaatccaataacaaaagtttttcttcccgtgtcacaataatactatacggacttaaataccgataacactgcatccgcctgctgcggtgataacaatccagttccgtacacaacattcgaaaccactgaaataaaagttcctttggtatttgcctgtttttctgaaggtgctcgatcagcgtctgtccctgcacataatccatagctggtctgcatatccctccgtgttcgataaaacgaaccacatcatatcctctctcgtctttcaattcttctcctctctgtattttgccctcttctgagcggttattccatgaaaaaatagattcgaccgaatctgcattgataacaggatgtctcctgccctgtgtgaataaagaatataaaaagtacttgtatcttacttgatttccattaaaaatgcaagcacttttccgcgcttgcattgtatcctctgtatttatttttccaaaaacagttttctcgtaataaaattgtatatcatgacaattgcagttgcccctatctttgcgatcatatagaaaattccaaaaatatcaaccgcaatccacattacgagctgattgattccaagccctatcacactcaagacaatgaaaataataaactctgcctttttgcttctgtcctccgctacatcaaacacccaatgcacactcaaaatataattatagatcacagaaacagcaaatgaaattccactggatatcaggtagttgattccaatcagctctgtcagaaaaatcatcactccataatcaatgacgaacgcacttccgcccacaaatgaaaaacggataatctgacgtatcagattcttttttttatgttctttcatcttctcactcttttctatttctagtcagacaaactctgctcacccaaggtccgtccaagcacatttcttttcggatatcattctatcccttccaatttattcaaggctgcttcaattactttatccatatcataatatttatagtcgccaagacgtccgccaaatatcacattggattctgagcttgcaagtttctgatattcctcaaacagtttcgtattcttttcatcattcaccggataatatggctccatgccgactttccactccgaagaatattctctggaaattaccgttttctcctgctgaccgaattcaaagtgcttatgctcaataattcttgtataaggaacttccctctctgtgtaattgacaactgcatttccctgataattatcacaatccaatacttctgtttcaaatcttacggaccgatactcaagcgcacccagctgatatccaaaatattcatcgatcatccccgtaaaaataatcttctctgcaatatccggctgttcttttcggagttcaaagaaatcgactcccgttctgacttctacaccgtctaacatcttctcaataataccattgtaaccaccgattggaattccctgataacgatcattaaaataattgttatcatatgtaaaacggaatggcaaacgtttgatgataaatgcaggaagctctttgcaatcacgtccccactgtttttctgtgtatcctttgatcaatttttcatatacatcgcgtcctccaagtgacaacgcctgttcctccaggttcttcggctctgtaatctgacattctgccacctgttttgcaatcatatccttcgcttcctgcggtgtgcggatcccccacatcttgctgaatgtattcatattaaatggaagattatataattcatccttatacacagcgattggagaattgatataattgttaaactcagcaaactggttgatataatcccacacctttttgcttgaagtatgaaaaatatgtgccccatacttgtggacatggattccttctatttcctcgcaataaatatttcctgctatatgatctcttctgtcgatcacaagacaatgctttccttttttatgtaattcatgtgccataacagcaccatataagccggctcctacaattaaataatcatactgatacattttttgccctccatagtctctgcaacaatatcctgttccatacaatctgaactattataacaccttctctcctttctgtacatatctcaaatttttttaatttttttcaaaaaacttgttgacaaatcaatttgttcaggttatacttaatttcgttgtgaacgacatcgttcctgacacgtgcgattagctcagctggatagagcgtctggctacggaccagaaggtcgggagttcgaatcttctatcgcacgctaacctctgcaagatacttgcagaggtttttttgtattctgatatacacttcgaactttttcaaatctggactagaattatccaatatcttgtgttataattttcaaatctactacattttgtattttacggactaaaatttgaaaaggagacactctatgtatacaatcgatcctttcggaatcttcgatcgaaataaaattactgcggagttttcagaggctctgccaaaagaatttcttgacaaactacatacgcttctgtcaaatattcagactgattttacagatgactgctattcgctggagcatctatacaccaaattttatagtttcctcacgccgcaaagcacctgggaacagaaattggaaatcctgtttcaggcagcatcagaactgaccactgcagaagccccaaaatgggaatttattgctgcaagactgctgtatttccaatttgacgtgcatttaaaacaagaagaattgcacagaggaatttctgatttctatcaaaaactcgtgtatctgacagaacaaaatctgtatggttcctatatcctggaacactattccagagaagagctcttacttgctgaaacttatctggtttcggaacgcaatcatttatttaccttctccggcctggatctgcttttgaaacggtacgtcattcgtacacacaaccacattcctctggaatctcctcaggagatgtttcttggaatcgctctgcatcttgcaatgcatgagaaaaaagaccggatgtactgggttcagaaattttacgatatgttgagtcgtctggaagtaaccatggcaactccaactctgtccaatgcacgaaaaccgtaccatcagctttccagctgtttcatcgataccgtaccggacagcctggaagggatttaccggagtattgacaacttcgcacaggtgagcaaatttggcggtggtatgggaatgtattttggaaaggttcgggcaagcggaagtaatatccgcggttttgaaggcgctgccggtggagtgatccgttggatccgtctggtcaatgacactgcagttgccgttgatcagctcggtatgcggcaaggtgcggttgctgtttacctggacgtctggcaccgggatcttccggaatttcttcagcttcgcacgaataacggagatgaccgaatgaaggctcatgatgtatttcctgcagtctgctatcctgacctgttctggaagatggcaaaagaaaatatgaatcaggactggtatctcatgtgtccacatgaaattttccagacaaaaggataccatctggaagactttttcggaagagaatgggaagaacgctatctggactgtgtacaagatccccgtatttccaaacgaactgtctccgtaaaagatatcatacgcctggttctccgctctgccgcagaaaccggaactccgtttacctttaacagagacacggtcaatcgtatgaatccaaacggacataccgggatgatctactgttccaatctctgtacagaaattgcccagaatatgcaggcaatcgaagaagtcagcaaagaagtgcagactctggagggcgatcccgttgttgtaaccgtaaccaaacccggagaatttgtcgtctgtaatcttgccagtctctctcttgggcatcttcctgtcacggatacagactatatagaagaccttgttgcaactgccgtccgtgcactggacaatgtgatcgacttgaacttctatccgactccatatgcgaaactgaccaatcaaaagtatcgaagcattggacttggcgtcagcggttaccatcatatgcttgccaaaaatggaattatctgggaaagcgaagatcatctgcgctttgccgaccgcgtctttgaaacgatcaactatgcagcaatccttgccagcaccaatctcgccgccgagaaaggaagttatactctttttgacggaagcgactggcaaaacggtgtctattttgaaaagagagactatcattctaaaagatggcttgccctgaaagaaaaagttgcccgacaggggatgcgcaacgcctacttgcttgctgtcgcacctaccagcagcaccagtatcatctcgggaacaactgcagggctcgatcctattttaaagcgttattttctagaggaaaagaaaggcagcatgctgccaagagtcgcccctgaattatcaccttctacttactggtattataaaaacgctcatctgatcgaccagaacttcagtatccgcgcctgtggagtgcgccaacgtcacattgatcaggcacagagcatgaacatttatatcaccaatgacttcaccatgcgtcaaattttcaatctgtatctaaaagcatgggaagaaggtgtcaaaaccatttattatgtacggagtaaatccctggaagtcgaagaatgcgaaagctgctcttcctgataaattcaatcaaaactaggagaatttttatgtctgaattaaagaaaaagcctctgttcaatcccggcggtgacacggatcttagtctccgccgtatgatcggcggcaatacgaccaatctgaatgattttaataatatgcgttacacctgggtaaacaactggtatcggcaggccatgaacaacttctggatccctgaagagatcaatctttcccaagatgtcaaagattatccgaatctgacagaaagcgaacgcactgcatataacaaaattttaagttttcttgtatttctggattcgatccagaccgcaaacctgccttgcattggagaatatatcacagcaaacgagatcaatctgtgtctctccatccagacatttcaggaatgcgtacacagccagagctacagctacatgctggactctatctgcagtccggtcgaacgaaatgaaatcctctatcagtggaaaaatgatgaacacttattgcgaagaaatacatttatcggaaacttgtacaatgaatttcaggaaaaaaaggatacatttactctgctgaaagtcatgatggccaactacattttggagggaatctatttctacagtggatttatgtttttctacaacctgagccgaaacggaaaaatgccgggctctgcacaggagatccgttatatcaaccgggatgaaaatacacacctctggctgtttcgcaatatgatcctggaaatgaaaaaagaactgccggaattattcactccggaacatatcgcacatctaaaagacatgatggcagaaggcgtccgccaggaaattacgtggggacattatgtcatcggcgatcagatttccggattaacaaaagaaatgatcacagattatattcagtatctcggaaacttgagattcacaaatctgggctttgatccgctctatccggatcatatacaggaacctgaaagtatgcggtgggtcagccagtattccaatgccaatatggtaaaaaccgactttttcgaagccaaaagtactgcctatgcaaaaagtactgccctgatcgacgatctataaaacataagccggaaaccacatcaatctacggtttccggcttatttttattcttctttgaacttttcagcctgtgctgcaatcagttcctgatcatcaaaatagttgatcttcatagattctttcacttcctgaagtgtcttcgctgcaaccgcttctgctttttcgctgccctttctcaggatctcatatacatacggaatatccttctgatattcttttctgcggtttctgatcggctccagttctgcctgcagtacattgttcaggaaacgttttactttcatatccccgagaccaccccttgtatagtgatcttttaactcctgcagattcgcatattccggcagaaattctgcaaaatactctggtctgcagaatgcgtccagataagtaaatacggtattcccttccagttttccaggatctgaaactttgatgtgcgtcggatccgtaaacatactgaatacttttttctgaatctcatccggttcttctgaaagatagatacaatttccaagagatttgctcatcttcgcctttccatcggttcccggaagacgcagacacgcctgattctcaggaagcaggatctccggctctatcaatgtatctccatatacggaattaaactttctcacgatttcttttgtctgctccagcatcggaagctgatcttccccaaccggaactacattggccttaaatgcagtaatatctgctgcctgactgatcggataggtaaaaaatccaaccggaatactggcctcaaaatttcgcatctgaatctcagatttcacggtaggatttctctgaagtctggagactgtcacaagattcatataataaaatgaaagctcacacaactgtggaatctgtgactgaataaacaacgtgcatttctccggatccagtccgcatgccagataatccaatgcaacttctatgatattctgacgcaccttttccggattgtctgcattgtccgtcaacgcttgtgcatccgcgatcatcacaaacatctcatcaaaatcccctgtattttgcagctctactctgcgttttaaagaccctacataatgtcccacatgaagtcttcctgtaggtctgtcacctgtcagcataatctttcccataattagatacgctcctttatttcattttctcatagtctgcactcattataacactatttcgtatgatttggctagagttgtttcaatcgccttccactcccggaaaattctccagaaatcttccaaatttttctgcccaaacgtatctggttcgattccttttgcatacaaaaaagaaatcgtacacagtccgtacgatttcttcatccactcttttaaaattatccaaactctcgtcttctcgacacacttggaactttctttttctctgttgcatagacaaactgatacaatgtatatgccatcagaatcgctcccatcacatcgatcacagaatgctgttttaaaaacatcgttgcaagaatgatcaatcctgctaaaatatatgctccactgctgatcaccggatgcttcttcagcttctcactctgcgcgattgcaatgcaggccgccagagaattgaacacatgaagactcggaaatacattcgttggtgtatctgcccgatacaacatcctcaccatatctgtaaatacattatctctcggaaatacaaccggtcttagcatcagtccattcggaaataccgtagaaatcagaaggaaaatcgtcatcccgatgaagctaagctttgcaagcttgtaaaatccttctacatccgtaaagaaaaagtagagaaatactgctgcaataaatacgaaccaaagcaaatacggtatgataaaatactctacaaatggaatcttgtcatccaatgccgagtggatcacatgatagtccgatgctgcagtaatgtgcttttccagatacataaaccagggcatataaataaacgcgtacaggaatacccatgcatgcttatatttttttatcattctcttcaatgcactctccctgttcattctaaccgctccttgatataaaaagtaatattcctttaactttccacgattatagcacgattttttttaatcaacaaggtgattcataaaaccttaacaaatctttcaattttctttctatttcttctaatttttttcgaaaatatacatatcaaatcgactttttgcccgttgcatcatcttctcaccgtgcagcgtccatgcagcaatcggtatatgaaacacatgtttttgtatccacaaacttacatttctgctgtcttccatcttataagaaataaaatccggtctgcagatgcaattgctcaataaatattttacgcaaaaacgaaacatataatgcggagttttttcactttttacgaggtctgaagacagctgtccacgaaggatctggttttgattctttttcatccatcgaagtacaagactgttaaacgactgtaccagaactacgcctttatacttcttcatctcccttgcaagacaacgacaaatctccatatcccccgtcaacaacttcacttcgatcaaaatggggacctttccctgcacaagatgcagcacatcttccagcatcggaatcgtctccgcagtatccaaaagccgcaggtcttttaattcttcccaggtcttctcttctaccgtccctgataccccgcacatcctctgtaaagtatcatcatgaaaaactaccagtttttgatcttttgtcagatgaatatccagttcaatcccccttttttccttcactgcttcctgaaatgccgccattgaattttccggaatccctctgcttttatcgtgcagtccccgatgtgcccactgggttccccgaaacttccagatgtctctttttcgctccatttccggaaagatcagataaaagtaagcaccgatcactacaaaaatacatcctatcagatatttccacatattcttcgcactcctttatgatgtgatcacctggatctgctgcggcaatatatgtactttgatctccttcttcaaaaatattgcttcgccatctgtgtgaactgcccgtgcctgtgaaatatgaatttccgcctctttacatcggaacacagaaatccctttctttccaacgtgttttccctgaaatgccaaaagcagtgttttgaccacttgccatcttttcagaccggacacaacgatcacatccagtttcccgtcttttggatctgcatccggacaaaactgaaatccgccgccttcatacggctgattgtgaacagccacaaaatacgtatcttttaacactacttcttccccgtccaatcggatctcagcccgcacaggatcatctttgatcagcctgtccacagcaatccccgcatacgtcaattttccaagtccgatcttattgagtgctgcttttaatttggatacactcgcctggtggcagatgaccgcatcaaatccaatgcccgcactgactgcaaaccgcctgcttttttccccatactctacaacgcctatatccattttctcaatacaccggggatgtaagatcagctccagtgccttcatcggatcctttggaattctcatccccctggcaaaatcattgctggacccagtgggaatatatccaaggatcacatgttcaaaatcctgaactccatttaccacttcattgactgtcccgtctccgccaagaacaaccagtgttttcgtctcctggtctctggtcagtccgtccgcaatcgatgtcgcattttttcttcgttctgtcagatatacttcatattctatctgacggctttccagctctttttgtactttttcccaaatctttcgtccttttttcgaacgggaattgggatttacaataaaacaatatctcattccagaaacctccggatctattctaacgtactgtccagatatttgccaagagaacgtgccatattcccctcaaaatctgcttctccatttctcagacaccattcaaatacatttccgatcacgatcatacggatgtctgtagtaaatgcctcgatttccacattcaggcggattctgttttcatgaattgctttctccacatagttttgcaccgtcacgatcggataaggtctttccgtcctgctgaccggattgagtgcctggtttttcggatcataatatcctgccataaattcaacacccagttctttacaataagaaacataattcaaatacacctgaataattgtttttttcgcatcttctgcattctcaggcagatccagaatatccggattgatacttggctgatcctcgatataataagacaaaagatcgtcttttgtcttaaaatggtggtaaaaacttccatttgagaccccagcctcttcacatatatttttaattgataacgtctcgtatccactgcgctgcagaatccgctttgccgcttggaaaatcttttcttttgtctctctcgatttcttctgctgcctggataatcctgctgtctcttccattctaatcactcctcgcattatttgcccccaagtatatcataaatcccgaagtcattcaagaaaacagagcatactctaatctatttctgtttccatacacaatacgcctcaaatgcagacggaatagaatacttttcttttagcacctcttctttggcaaatagcatttcctcactgcagtttttctccagctcatccacacggatctcataccctttcatctgccactccacatgactgaaaatatgttttgcatccggaagttttttgacacggatcggcgcaagtccgatggatttactgtactctatcacttctttctgactcagccagccctccagattcgggagttcatacaaccctgcaagaagtcccttttccggtcgtttccgaattgccaatgtatcattgtcatgaaagaccagtaccgtccgcttttctattttcctgccttttgcctttgtttttaccggaagctccattgcaatcccttccctgcgtgctctgcagatacctgctgccggacatatttcacattttggctctccatttggcacacacacaatggcgccaagttcgatcagcccctgattaaaatcccccgggcaatcctttgggatcacctcttccagcgcagtttctatcgcagtccggactttggctttcataatatcctctctgcttgccagaatccgggaaaccacacgcagtacattgccatccactgccggttttggaataccaaatgcaaaagaactgattgcgcccgccgtataatttccaattcccgccagctgtcggatttcttcgtatgactgagggaactctccgccatactgctccaccatctgaagggctgctttttgcatattgcgcacccggttataatacccaagtccttcccacaacttcatcagccggtcttcttttacattggccagatctgaaatggtcggaagcgcgtttaaaaatcggtcataatacggtttcactgcttccactctcgtctgctgcagcataatttccgatacccacacccgatacggtgtcacatcatgccgccatggaagatcgcgtttatttgcccgataccacgtgacgatcggagcaacactttcccataaaagcggctcttccagaatcacaggaacttcttcatcgatccaaatggaatcttcactcacctgacagtcatatgccagaatgtttacgcctgccgcctttgctcttttcaatgcttcgccaaattccggctgtgtatccatattcggtgtgaaataacgaactcccttcatctgaatcaccagaaacacatatgcctcatatccttcctttttcgcccggatcaattcttccacatgttttactgcacgctcacttggtgcatccggaaagcgaacaacatcattttcctccagcgtcactcccttcacttcaataaaggctcttttttcacctgactctatataaaaatcaaaacgggagtttccatacgttgtctccggacgaatcctgactggttcttcgaacagattgcctgcgctcagccattcttccactattttattcggaatctgggaatccatattgatcagccggtctccttttttgaccccgatcagatcccattttgtcttccgctgcggattatcactttcctgtacaaatatttcggcttccggtacaagaagttctgcgcacctgcctgtatttttcacatggatcgtctcctgtctgccgccaatccttgcatatgcgataaaacgattggggcgctccagaaatgccgcacgttctattctctcatatttcatactttttttctcctactattatcagtttcccccagtctgaccttttccaaccgctttgcatcttctttcgtcagataatcaaacagatagtttctgtcatgttgccccttttcaagatgctcctttcgaagttcctgcagcgccagttccacttcctcttttaatccgggtgctgacatacgcactgcgccctgtcccaggatgatcacctgctccatcgcatccgatgtagcaactgtgacatgatgatttcttccaattctgcgtactgttttctcaatatactgatctgccgtctctgcctcttttgtatagactacatggatattatgatattgcatcactgaacctggacctccttctactttgtaagcatcaaacaccaggatcaatgtgcattttttatacccctgatagttgcacaacacatccatcaatttgtcacgggcacttttgagatctgactttgccagttctttcaattcttcccatgcaaaaataatattatatccatctaccagaagatattcttcttgcttttccatcttgcgtgctgtccatttatcatcttctgccggctgtctttttgctcttacagtcacaggtgctctgttctttttcaccggatcgggagtcctgacataaattgcatccagctcttcctgtgtcagttcgatctgagaagatgtgctgcgcgtctgccgcacaacaggacgcatttcttcttccgaaagtacattgctctcaagtgtgttttccaaatgcatgtatgcttctacttcgtcccagtttactacaaaccctgctccatgtgcgcaaaacaccgaacctgtcggattctccagatctgcttctggatcatatccgatttcttccacaattttctcctgatccggacatttttcgtatccttttaaccgacaggacatcctgcctcttccacccgtatatgagatcaattctgtttgatagccccgcatctgcgacactggagcacttccttttaaaacagacagttccccctctgtaacaggtggttcaaatgttccgttccttttctgaatatccatcatcgcacgtcctacatgctccggcaaaagctccatttcaaactcataataaggctccagcagaatactttttgcctttcgaaggccctgacgaactgcccggtaagttgcctgtctgaaatctccgccttccgtatgtttctgatgcgcccgtccggataccagtgtaatcttcatatctgtgatcgccgagcctgtcagtacccctttgtgttctttttcctccagatgcgtcagaatcaggcgctgccagtttcgggcaagaatatcttcactacagtctgcaaaaaactgcagcccgcttcctcgttctcccggctctaatacaagatgcacttctgcataatgacggagcggctcaaaatgtccgattccttccaccggttccgcgatcgtctccttatatacaacagttcctgccccgaattctacccgcactttaaaccggtcccagatcatactctttaaaatttcaatctgtacttctcccatcaactgtgcatgaatttctcccaactgttcttcccacacaatatgaagctccggttcttcctcttccagctcttttagattgagcagcatcttatgaacatcacaatccggtggcagttcgatctgatagcttaagaccggctccaaaaccggcatatccgattctgattccattcccagtccctgtccgggataggtatccgaaaggcctgtcaccgcacagacttctccggcatgtacctcctgcagcatctcatattttgccccagagtagcgccggatctgattgaccttttcctctgtatccgtaatcacatccctgactttgatccttcccccggtaactttcaaatagctcagccgattgccctgatcatctctcccgattttatatacttttgcaccaaatacttccggatactgctcttccgttgtaaattgctccagtgcatccagcagttcttccactccttctgtgtgaagtgcagagccaaaataacatggaaatacttttctttgatgaatcaactctgacaccttttttttaggaatgtctccattctccagataagattccaacaacatttcatcacacatggcaagctgctctgtttcttcgccgctttcactgtcaaacgctttttcaaaatcaatacaatgctccccgaagcgctttttcaattccgccagaatcacggttctgtccgctccatcctgatccatcttattgacaaaaagaaataccggaatccggtactgcccaagaagcttccacaatgtctctgtatgtccctgcacaccatccggtccactgatcacaagcactgcatagtccagaacttgaagagtacgctccatctctgcggagaaatccacatgtcccggtgtatccaataacgttatccacatatccttccaggagaacactgcctgcttggaaaaaatagtaattcccctctcccgttccagatcatacgtatccaaaaatgcatctttgtggtccacccgccccattttccggatgcttccacttgtataaagcatactttctgacagtgtcgtctttcctgcatccacatgagcaagaacaccaagacagatctgttttttattttctttcatttacatttcctcgttatcataagttaataaaaattattataccacatactgccgtttccgttaaaaaaaatttagctgcccatccaacgatgagcagccatataattctttcttttatttttataaaatttttgataaaaactctttcaatctcggatctctcggatgttcaaagaattcttttggacttccctcttccttgatctgcccttcatccacaaacacaactcttgttgcaacctctttggcaaatcccatttcatgtgttaccacgaccatggtcattccatcttttgcaagctgcttcatcaactccagaacttcacctaccatctccggatccaatgcagaggtcggctcgtcaaacagcatcacatccggattcattgccagtgcacgcacgatcgcaattcgctgcttctgcccaccggaaagctgttccggatatgcatctgccttgtcggcaagtccaactcttaccagaagttctctggcttttctttccgcttcttcctgggacatctttttcagtgtcactggtgcaagcatgatgttttccaggatcgttttatgtggaaacagatgaaaatgctggaataccattccaatcttctgacgatgcacatcaatgtctgtctttggatctgtaatatctgtcccctcaaataaaacagttccccctgtcggtacttccaacagattcagagaccgtagaaaagtagattttcccgatccggacggaccaataacaaccacaacttcaccttttttgatctcagtagaaattccacgcagcacttccaaatttccaaatgcctttttcaaattctgaacctgaatcaatacttcatttttatcgttcatttgtgcgcaatctcctttccagtttgttcataaagaatgtaagcagcatgacaagcgcgagataaattgccgcagccgcaagcaacggaataaatgcctcgaatgtacgactctgaattaccatcgctgcttttgtcagatcctgttccccaatgtaaccaatgatcgctgtctccttgatcagcacgatcatctcattgaccagtgcaggaagcacgttcttaaatgcctgcggcataatgatcagccgcatggtctgtccataactaagcccaaggcttcttcccgcttctgtctgtccttccggaattgccataataccggaacgcacaatctcagccacatacgcaccggaattaataccaaatgccagccccccaataatgatagaattcaatgatgaagagccaaagataaccagatacataaacaatacctggatcatactcggtgttcctctgatgatcgtcaaatatactttacaaatcgcatttaaaatttttagttttccggttttatcgtgcagagaacgaatgatcgctaccgtaaaaccaatgatcacacctaccaaaagtgcaaacaaagttacaagaattgtaactttcagaccattcaccaacaaaagccaacggtcatcttcaataaagttctgatataacttttccgaaaagctcatatttttacctctcttgtatgtttctttgacagttcaaaacagggctgccaaaacgattacgcacccctgttattgtatctcgcaaccagtctgtgattattttcttacgatcacaacctgactggcatttgcatatgtatctgtaaaatctgcatttttctggcgttctgcatccactgtcatacctgctgcaccaaagtcagcctttcctgctgcaattgatggaaggatggagtcaaattccatatccagaacttccagttcatatcccattttatcgcagatggctttggaaagatcaacatcaatgccgacgattccatccccttcatgatattcatatggttcaaattctgcattcgtagccatcaccagttttcccttggaataatctacatctgccggtgactcatactgataacttccgatattatctccgatataatttccaatgatcttctctacaatgccctcttctttcaactctgcaagcgctttgttcatttcatcaagcaattctgtatttccctttttcacacacattgcatattcttctgtttcaaaaacgccctctatgattttcagatcctcatttttttctacaaacttcgctgcaggctctgagtcgatcaacacacaatcgatctttccgtttttcaatgcctgcactgctgtggatccctttggataacgtttcatctgagaatctttttccacctgttcagaaccgatcatgtctccggttgttccctgttgaaccccaatcgtcagtgtcttgagatcttccggtttctccactgtaacatcttttttctccgaagagccacatcctgcgagtgagatcacacatgctgctgccagcacaattcctgttaactttttcattttcatctttcattcctcccaaaccaaatacatatagtctgtataatcattcatattatacatacatcataccatgttttcgggaaattacaagaccaattatgcataaattatcatttttaagcgcatattttttgtatataatttatttttatgcaagcattgcacgaattccgaagtatacaaacacaatgattccaagtacgatccggtaatatccaaataccttaaagtcatgattctgaatatattttagcaaaaacttaattgccagaatcgatacgacaaaagataccacacatccaagcaacaagagtccaagctccgtccccgtaaactcaaatccaaaatgacgcagctttacaagactggcacctgccattgccgggattgccaaaaagaatgtaaaatctgccgctgcggttctggatactccaagcgccagtgctcctacaatcgttgctcccgaacgggatgttcccggaatcatagccagcatctgaaatacaccgatccagagcaataccggaatccccatctgggaaatcttggtgatctgcggttttttccctttatgacgattttcaatcacaataaacaaaataccaaccaggatcagcatggtcgctaccacatatgaattattgaatttttcttcaataaaatcattaaataaaattccgactacacctgccggtatggatgcgattactacctttacccaaagctgcaacgtcatttttttctgcttttctgtctttttcggtgaaaatggattcagccgatgaaaatagatcacgacaactgccataatcgcaccgagttggatcacaacattaaacatatccagatatgactggctaaaatccagctttacaaactcttccaccaggatcaaatgtcctgtactgctgattggaagccattcggtaattccttccacaatccccagtataattacttttaatgcttctaacatctctctcctcctatctcaaagcaaacttttccactgcttttgccacgccctcttcctcgttcgtatccgtcacataatctgctgctgcttttacactctcctctgcatttcccatggcaactccaagtcctactgcctttagcatctccagatcattgtcaccatcgccgcatgccataatctcctctctggcaatccccaacatgcgtccaagctccagcattccaattcccttgttgattccctgagcattgatctctatattgttgcctaaagatcctgtcatcaccaatccaggaatcatttccaactctttcctcgcgcgctgcatctcctgcatatccgcaaacataagctgcaatttgtctgcatcgcgttttgcttcatcgtaccattttttaatggaaggaacgaccgtacgggtagaacgtacatactcccacatatgcggattcttatgataacgataaatctcctgtagtctgtcttcctgtgcatatacttcccggtcaaagtacgcctcttgtaatgtatcatatttttctgcaatttccaatgctttctttcctttttcataaggaaccggatgctccagaatcgtcttttgccggatcaggtcataaatccttgccccattggttgtcaatgcgtactgcatcccctggattgcccgtacctgagccggaattccggtaagcggccgccctgttgctgctaaaactatgatcccctgcgcaattgcctgctccaatacacttcttgtatgatctgacacttcttttctggaattcagcatcgttccatccaaatccaaccctatcatttttatctgtctcacgaagtctctctccctcttttttcttaaagttttataacttattttatcaaaatttgccttattgcgcaatttatagtataatgacaaaacagacttttttaatagaaaggaattaaagttatgaaatcatgcttaaaacgcaagctgcaaacaggtattgcccttatttgctccttcgcactggctttttccgttctccctgtttctgcagaggaaagcgcacaaagtcttgaaagcaaaacttccgatttgacaggccagctggccggtatcaatcaggaacttgtcgccatcagcgatcagatatctacaactgagatgcaggttgagattacaaacggcgagattcaacggaccaaagattccttggccgacacacaggcaaaagaagcacaacagtataatgacatgaagacacgtattaagtatatgtatgagaccggaagcgcatcacttctggaaatgctcttttctgcagaagatatgtctgattttctgaataaagcagattttattcagaatatcagtgattacgatcgtaagatgctttcagaactgcaggaaacgaagaatcagattgcagaaaaggaaaagactctgcaggcacagcaagattctctcctctcgcttcagaaccgtctggataaaaaacaatccgatttacaggcaaaggctgccgctacttccactgatcttgctgcttttcaggcacagctggctgctcttcgagcacaggaagccgctgaactggaagcgaaaaggcagcaggaactgcaacaacagcaagaagcggacaagccttcctccggaggcggtaatccaatcgttactcctacccctccggctacacctgattccgggggagatatcattcaaggcggaggttctgatgcaacacatgatgaactcactacttttgcggccttgttggactgtgaagccattcacgattacaactctatgctcgctgtagcaacagtgatcatgaatcgtgtagaaagtccacttttcccaaattccattcacggtgtcatctatgcaagcggacagtttgaacctgtctggagcggaagactcaattccgttctgagttccggtccatccagtctggcagttcaagttgctcaggatgcagtaaatggtacgaaactttcttctgtcagcgactgttactatttcctgtatgcaggcgctacaaatcgtccaggagtgaatattggcggaaatcttttcttccaaagctggtaattattgtattctacataaagaaggggcatatcgcatctgatatgccccttctttggagaaactttatattcttattggtaatccatcacatcgatccatctcatcaggaattctttttccagagcattttctttcgaaagctgagccgctgctacaattggcagccactgctgtacatactgctttgccgtatcactttttttacaaaagattttgagatacagatctgctttttcctgactgtccagtgcaaaaagaagatacgtcattgctgcatctgcacttgcatttccctgtgtcacatgtgcccagtcgatcaccgtcatcttgccgttcttaccaacgatcacattgcttggattgaaatctccatggcagattttatcatgctttggcatactttccaatcgcgtcatcaattcatatcgtgtcgttgcatccaacactttcagcccattgatctgacgtgcaaatttgtctttcattttgttcaaaagcggagctttcttactcgtaacactcaattgcagatctacaaaatcattcatatatttttccagatttgccggatccactttcatcatttcttccagtgtcttgccatccttatactcgatcaccagtgcccattttccatcaatctgcgtcacttctttcacacgcggaatatccagacctgcttcttcgacacgggcagtattcaacgcttcattcagtacatctgacttcggatgttcttttgcaaatacttttacaattccttcttcacatttatagacttctttgtaagaacgttttacaatcaaatttttttcttccagtttcataaacattgcctcctgtcatacatgcgatccttcccggtgagctctgccggcttggtatcgtttttcttgttgactctattataactcctatttttgtagaatgtaatacctggaaatcaagtttgtgcagtttttcacaatatttttcactttgtttttattgttatatttttaacttttagattttttcatacaccaaaaagaacattccgcccgccatttctgacgtttggaatgttcttttttattccttaccggaaattattttccataataacatttcaggtaaagttctttgatttctttcatcagtgggtatcttgggtttgctcctgtacactggtcattgaatgcctgctctaccatgtcatccagtgtatcgaggaagtatttctcatcgataccatattctttaatagatttcttgattccaatctgctcttttaagacttccagtcttgcaaggaaattctcaaatacttctttgtcgtcttttcccgtgcatcctgcgaaacgtcctaactcagcgtatcttgcaagtgcatgtggatactgatactgtgagaatgttcccatctttgtcggagcctcagatgcattgtatctcatgacttctgtcagaagtactgcgtttgcaacaccgtgtggcaggtggtggaatgctcccagtttatgagccatagagtggttcaatccaaggaatgcatttgcgaatgccataccagccatacaagaagcgtttgccatctcttcacgtgctttcggatcatttgctccgttctcatatgcagatggaaggttttcaaataccatcttcactgctttcatagcaagaccatctgtgtagtctgtagccatgatagatacaaatgcttcgatcgcatgtgtcataacatcgataccggatgcacttgtcagtccttttggctgtgtcatcatgttgtcaacatccacaattgccatgttcggaagtaactgataatcagccagcggccattttacacctgtctctgcgtctgtgatgatcgcaaatggtgttacctcagatcctgttcctgaagatgtcggaattgctacgaaatatgcttttttacccatttcagggaatgtatatactctcttacggatatccatgaaatccatcgccatatcttcaaaatttgcttctggatattcatacattacccacataatctttgctgcatccattgcagatccgccaccaagtgcaatgattgtatccggttcgaaagaacgcatcatatctgcacctttctgtgcacactgcaatgtcgggtctggagcaacttcataaaaacatgtgtgctggattcccattgcatccagtttttcttcgattgcttttacatatccgttcttgtacaggaatgagtctgttacgataaatgcttttttcttgtgcatgatcgttccgagttcatccagtgcaaccggcatacatcccttcttgaagtatactttttcaggtgttctgaaccagagcatgttttctctcctctctgcaactgtcttcacgttaatcaaatgttttactccaacattttctgatacggagtttccgccccatgaaccacatcccagtgtaagagacggagccagtttgaagttgtaaagatctccgatgccaccctgagctgcaggagtgttgatcagaacacggcatgttttcattgctgcatagtgtttttcaatcttttctgtctgtgcaggatgaacgtacagagcagatgtatgtccgtatccaccgtccgctacaagctgttctgcctttgcaagtgcttcatcaaatgtttttgctttatacatagcaagtacaggagataatttttcgtgagcgaattcttctgaaatatctacagattctacttcaccaatcaggatttttgtattctcaggaacatccacacctgccatttttgcgatttcatatgcagattttccagggattttgctgtttaatgcaccattgatgatgattgtcttacgaactttgtccagttctgctccttttttcaggaagtagcatccacgatactggaattctttcttcacttcttcataaatgctgtccaaaacagtaactgactgctcagaagcacagatcataccgttgtcaaatgttttagaatgaatgatggagtttactgccattttgatatctgctgtttcatcaatgataaccggtgtatttccaggacctacaccaagtgccggttttcctgaagaatatgcagccttcaccattccaggaccacctgtagccaggatgatgtcagaatctctcataacctgatttgtcagttccagagatggaacatcgatccatccgatgattccttccggtgctccggcttttacggctgcatccaatactacctttgcagcttcgatcgtacatgcttttgcacttgggtgtggactgatgataattgcatttcttgtcttcaagcagatcagtgttttaaaaattgctgtagatgtcggatttgttgtcgggataacagccgcaacaagtccaatcggctctgccacttttttgattccgtatgcagtgtcttcttcgatcaccccacaagtttttgtatctttatatgcattatagatgtactctgctgcataatgatttttaatgattttatcttcaagaacacctctctgtgtctcttcaactgccattttagcgagtggaatacgcattttgttcgctgccattgctgcttcatagaaaatcttatcaacctgctcctgagagaattttgcaaattctttctgagcctcacgcattgctttcatcttcgcttccagtgtttctacgctgtctacgattgcaggtactcccatctcttctttcttcttcgccatttcaataatcctcctgtaattgacttggtttcttcattacatcttaattacaggtattagtatactttcttgttaaataattgtcaatataggttttgtcaaatatttaacgttatatttttaacgtcaattggtagatttgcacaaaaatctaccactgtgctaccaatgaaagatcaccggcgtccctggttccatcatctgaaataaggctccggcctgatccagaggcatattgatacaaccatgagaccccactccgtgaatctgatatcgtgttccaccgaatgcgctctgccatgttgcatcatgaaatccaactccactatttgtcacctgcatccagtatttcaccggtgttctatattccggttctccggtttcgggaacaatattccctaccagagtagcatttggctgtttccacagcagagaatatacgccttccggtgtaatccttgacgggatcggctctcctgtcaccacatctgtctcaagtacaacctgtccattctgcacataccacatatgctggatactcatatccacttctgcatacgtgctgccccaatcctgagctttatgtgctgcagctataccgcctgcatagtatgccggttctcttgtagttacttcaccgtttaaaatactgtttttaagattcacaagctccgtattctcatcaatcgaccatccataagttccccctgtcacagttgcaatttttccagtcggtgttgtaaatgtcctcgtcgttccctgtgtatcatacttgtcaccaaatgccgtaaaccattgcttcatcgcctctgtattcaaggagacattcatctccccgtctacctgcagccattgagaaatcaacgccttatcaacgacaaccggttcattcataggatatgtaatacttgcatttaccgatttattcatcgcatcacaagctgcctgtacctcttttgaatcttttacatatttaggttttgaataacattccgtctttaacatatccagttgtggagcaaatccttcaatatgctctttaatctgtttaacaagctgatccttctctactgcacttccatacacttccgctttgactacatatttttctccatcaaattccggttttgcattttctgccggggtctgctctgcctgaagacaggacagtccagaaattttctcattcagcgcctcttcattatattctacattgattgcaatcttttctgaagattctgtaaaaaatgcttttggccacaaaaatccattctggctcttcaaaagtttctcagtttcctttccaggagtatacttcagatgaatttcacttccgaaaatttcgtctttctttccttccttttcaagaatcgtaagtttataatcctttaccctctcttccagatactgttccagatcttttgccgtttttccagaaaagtcctgaccattgatctttgtattcataaaaaaatgactcataaaaaagacagaaatcccaacatagagcaaacagattcctgccagaatcccaccgataacccaaaaaacttttcgtctgctaatactttctttctccacatttttctgttttttcacatctttcatccctaactccccttttgtagtttcatatacgatattgccatgcacagatgccgacagtattctcttatatattagacgaaaaacattacaaatatgttgcaaaactcattaaattttttttaatttttccatacatcaaaaaagacaccagaaaaccatcactggtcttcaagtgtctctctgtgtgaaataacttctgattaaactaactcgatcagtacttccatagctgcatcacctttacgctgtccaatcttaacgattcttgtgtaaccaccgttacggtctgcatattttggagcgatctctgtgaataatttatccactaaatccactttcttcatatttctcttgatgttgttctttggagcttctgtagctgtgtaaagaactttcagcatctgtcttcttgcgtgaagtctgcttggcatatcttttttgattgtcttttcaacttcttcataaacagttacttttttaccatcaacaacttctttcactcttctgcctttgtcgtcttttttcgcaactttagcttttacagttacttcttcaaagttatctttttcttttacagctaaagcgatcagtttttcaacttctttacggatctcttttgcttttgcttctgtagtaacgatcttaccattgttcagtaatgctgttacctggtttctgatcaatgcttttctctggctggatgttctgccgagttttctatattttgccatttctatggtcctccattaataacatttggttttgcatcttcgggcttataaatcaaatgctcccgccacgctcttcgggcttactgacgggataattttctttattcctctccctgatttaactcaaggtttaattctttcaattttgccagcacttcttctaaagacttacgtccaaggttacgcaccttcatcatatcttccggtgtcttatttgtaagttcttcaacagtgttgatgccagctctcttcagacagttgtatgaacgtacagaaagttccaattcatcaatgctcatctccagaactttctctttctcgtcatcttctttttcgatcatgacttcagctgactgagcaacttcagaaaggtcaatgaataatttcagatgttcactgagaacttttgctgcaaggctgactgcctcatctggaagcagtgttccttttgtccatacatccaatgtcagtttatcatagtctgtaacctgaccgacacgagtattctgaacggtcatattaacacgctcaaccggtgtatagattgaatcaatcgggatcacaccaatcggcatatcctcactcttattcttgtctgcgcttacgtatcctctgccctttgtaatggtaagttccatatacaatttgctgtctttaccgccgctcaatgtagcgataacctgctccggattcataatttcaatatctgaatctgtctggatatcagcacctgttacaacaccttctccttcaaactcgatatatgcagtctttacttcgtctgattctgatgtatttttgattgccagggactttaagttcatgataatctctgttacatcttcttttacacctgggatggaactgaattcgtgcagaaccccgtcaatctttacagaactgatggctgctcccggaagagaagaaagcatgattcttctcagagagttacccaatgtaattccgtatcctctctccagaggctccactacaaattttccatattttttatcttctgaaatttctgtaatttcaatattcggcttattaaaatcaaacactacacagaccctccttatgggttaatatatgttgagggggtacaatgttaaatctccggattctaaaatttctgctgctcactgagagattatttagaatacaactcgacgattaacatctcatctacaggaacatcgattgcttctcttgaaggaagttcttttactgtacctttcaggttctctgcatcaacttccagccagtcaggaatcatgtttccacctgttacttccagaatatctttgtatctctggcagtctttgtgtttttctttgatttcaatcacatcaccagcttttacaaggtaagatggaatgtttacctgttttccgtttactaaaacgtgcttgtgatcaacgatctgtctagcttcttttcttgttcttgcgaatcccatgcggaacattacgttgtccagtctggattccagaagaatcatcaggttttcacctgtcataccttccatctgttttgcttttgcatagtagtttctgaaaggtttctctaatacaccatagatgaattttgctttctgtttctcacgtaactggagaccatactcgctcatttttctatttgctctttttaactgtctgttcgattttttgttaattcctaaatagattgggtccatacctaatgaacggcatcttttaagaactggaactctattaactgccatgtttatcctccttaaaaatcagcggaactgcagtaatccgctatgctcattgctcaaattctatctcagctcacctgcagcaaaaactgccgccaagtctaaaattagactcttctgcgtttcggtgggcgacatccgttgtgtggtaccggtgttacgtctttgatacttactacatcaataccgcaagcctgtaatgcacggattgcagcttctcttcctgatcctggaccctttacgaaaacatctactgttttcagaccatgtactaacgctgcctttgctgctgtctcagctgccatctgagctgcatatggagtagattttcttgaacctctaaatcccagaccgcctgcacttgcccatgaaagagcatttccctgtgtatctgttaatgttacgattgtattattaaaagatgactggatatgtgcttgtcctcgttcaacgtttttcttgacacgtttctttgtcactttttttgtaactttcttagccatttaaactaacctactttcttgaattcttgtattctcccatctgcggagatattactgtttattattttttcttatttgctacagttctcttaggacctttgcatgttcttgcatttgtctttgttttctgaccacgtaccggaagtccttttctatgacggattccacggtaacatccgatttctttaagtctcttgatgtttaactggatttctcttctgagatcaccttctacaacctgagtctcatcaattacttcactgattttcttaacgtcgtcctgtgtcaaatctctaacacgtgtatctggatctactcctgcatctgcaaggatacggatagcggatgttcttccgattccgtaaatataagtaagtccgatttctacacgtttgtctcttggtaagtctacacctgcaatacgagccatgtgtctttcctccattttgaatctaaatttaatattgtctttaactgggtgtgtcagcttttgccaaagcacaccaggcatacatcatgtataccctttcccgacacgcaaaacatacttttacgcaaatgaccgtcgggtattagaagcaatatacacacacatacattcctgccaaatgcagaaaaaagaacctgtgatgctgttctttgcgtatgtgtcaagaccaccagccttttataaggcaatctgccaaatgcgtagcagtggtgtatccttactgtatattaaacagccctacacacttcctggcgtgtcgcgctgtcagccgcctaattcaatccacaaactttcaattaaccctgacgctgtttgtgtttcggattctcacagattactctgatgcttccttttcttttaatgattttgcatttttcacaaattggttttactgatgatctaaccttcatgtcaaatcctccttccatcctttgctaaaactcttacgtttccaactgttttcggacacacctacccaaaaacagccacttgatattatagcactctatatctaataaagtcaatacctttttatttatctctccaaacaattcttcctttactcagatcatatggagacatctccaatgtaaccttgtcacctggtaaaatcttaataaaattcatacgcagttttccactgatatgagccagtacaatatgaccattttccagctctactttaaacattgcgtttggcagtttttcaactacgactccttcaatttcgattacgtcagcttttgacatcttaaatcctcctgcgctcttgacgcttctacttctcatccaatagatttggaatactttcttattacatttctgattgtttcatcatcggtcaccgaggtactgtgaacctttttgatcggctgcacatgtctctggttttttttcttagcccggcagaccggacgaagatgcccgtctgccacatatacatattcatctttgacacaaattatgacatacatacaatttttatcatgccctgctgttgaacgcgcaagcattcctggtttcatctgcatgtactattctcccagaatctgaacaattgcagcaaatacatcattgatatcaattgttccatctacttcttttaaaattccggcatttgtataatagtcgatcaacggctgtgtctgctcatgatacacgccaaggcgttttaatactgtttctggcttatcatcgtctcttaaaatcagacttccaccacatttatcacagatatcctctttttctgtcggtgcatatacaatgtgataagtcgctccgcagtctacgcaagctctgcgtcctgacattctgtttacaatattctcatccggaacttctacattgattgcataatccatcttctgtcccattgcttccaacgctttatcaagcgcttcagcctgtggaatcgttctcgggaaaccatccagcacataccctttggaacagtcttcctgattgactctgtctacaacaagatcaacaaccagttcatccggcacaagaagtccctgatccataaatgttttcgctttctgtccaagctctgttccatttttaatatttgccctgaaaatatctccggtagaaatatgtggaattccatatttctcagcaatttttttagcctgtgtgccttttcctgctccaggagcacctaacataataatcttcataacggtatccctccatatagcactttaacccgctgcatactgctccaaaaggaccagcacacaacgagctaaattgtctcattttatatccagaaaatctctttaccttgatgcgcccttactgctcaggaatcctgagtaattacgaactagcatctgcgattcgatcttcttgattgtctcaagtacaacacctacaatgatgatcagcgaagtgcctccaaacgaaacatttgcaccaaatacaccattaaagaagaacggaattacctgaacaatcacaagtccgcatgcaccaatgaatacgatacgattcaaaattgtctgcagatattcgactgttggttttccaggacgaattcccggaataaatccgccgctctttttcatattgtttgcgatttccaatggattaaatgtaatcgatgtgtagaaatacgcaaaaaagattgtaagcgcaatgtagatgatcaatcctattgaatatatcaaattatcaggatcacaccagttatttgaattcatcgtacgaagaatctgacttccccatccgtttccatttccttttcccaggaactgtgcaatcacaatcgggaactgcatcagtgaagatgcaaagataaccgggataacacctgaagtatttacttttaatggaatatgtgtagctttgccaccatatgtccttcttccctgtactttctgagaatactgtactgcaattcttctttcaccatcctgaagaatgataacaaataccacaactgcaaccaggattgcaagaataataattgccgccagagcaccctttgccagagtttttcctttaataaactgtgtgtaaagcgtcataaagtcttccggcacacgagaaaggatattaatcaacaatacgatggaaataccatttcccacacctttttctgtaatacgctcaccgatccacatcaggaatgcagaaccggcagttaatgtacacacaacaattgcaacatttacaaaattaaattcttccagaagtccttgacgaccaaatccaacagacattgcaatggattcgatcaatgcaagtgctactgtcacataacgtgtgattgctgcaattttctttcttccctctgctccttctttctgcatatcctcaagttttggaattgcaatcgtcagaagctgcataatgatggaagatgtaatgtatggtgtgatgctcagtgcaaaaactgacatccttgtgaacgaaccaccggtaaaagcatcaaaaaaactatatgcaccgttattctggttcgcaagtaaattctgaatgtaagtcggatcaactcccggtgttgggagctgagaaccgaatcttacaacgatcagcattaaaaatgtatagaaaagccgttttctaatgtcttctatttgaaatgcttttcgcacagtcttgagcattagatcacctctgcttttccaccaagggcctcaatcttttcaacagcgcttgcactaaatgcatttgcctgaacagtgagtttcttagttaactctccgtttccaagaattttaacaccatctctaggatttgttacaagaccgctttcgatcagtgtttccactgaaactgttgcgccatcttcaaatctttctaatgcacttacattgataccaacgatgtctttagagtttctgcatttgaatcctctctttggtattcttctgtataaaggcatctgaccaccttcaaagcctggtcttgttgctcctgaacgagctttctgacctttgtgacctttaccagctgtcttaccatttccagaaccgtgtccacggcctcttctgaaattatcgctgtgcttagaaccgtctgccggtcttaagttagataagtccatgatattacctccttatcgtctgaaattaagcttcttcttcaacttttactaaatgtctaacctgctgtaccatacctctggtagctgcattatctggtaatacgactgttttgttcactttctttaatccaagtgcctcaacagtttttttatgctttggtacggcaccgattgtagactttactaatgtaacttttaaatttgccattttcatttacctcctagcctacgatctcttctactgatttgccgcgaagttttgctacttcttccggagtcttaacgtttttcagacctgcgattgttgcaagtacgacattctgtttgttgttagatcccagagattttgtacggatgttcttgatacctgccatctcgataaccgcacgcgccggacctccggcgataactccagtaccttccggagcttttttcagcagtacggaagcgctgccgaattttccgattacatcatgtgtaatactttcgttttcatccaatgcaacctcaatcagatttttcgctgcatcttcttttcctttacggatagcttctggaatttcagtagcctttcctaaacctgcaccaacatggccttttccatcgccaacaactactaaagctgtgaatctgaagttacgaccacctttaacaactttggtaacacgtttgattgataccactttttctgttaattctaaattactagcatcaatgcgttcctgtctcatatgtgttctcccttccttagaaattcagtccagcttctctagctgcgtctgctaatgctttcacttttccctgatagatgaatccgcctctgtcgaatacaacatcagtgattccttttgcttttgctttttcagcaattacttttcctaagtatgctgctgcttcaacgttgttggttttttctaattctgcttttacatctttttcaagtgtagatgctgcaaccagagtgtttccaactgtatcatcgataatctgagcatacatatgattattacttctaaacacagccaaacgtggtctttcagcagtaccgctgaaacggttacgtaatttcatgtgtttttttctacgaacttcgcttcttgatttcttactaaccattttcacactctccttaattatttcttaccagtcttaccaactttgcgtctgatcacttcatcagcatatttaatacctttacctttgtatggttccggtcttctcttatctctgatttcagctgcaaactggccaactttttctttgtcgataccttttactgtgattttgttctgaccttccagtacagtctcaacaccttccggatcgatcatttcaactggatgagagtatcctaagttcaatgtcagtttgtttccagatttggatgctctgtaaccaacaccgttaacttccagaactttttcgtatccgtttgttacaccaacaaccatgttgttgatcagtgttcttgtaagaccatgaagagatttcatttttttgagatcgcttggtcttgttacaacaacttcttcaccttcaactttgatttccatttcaactggaagctcttttacaagagttccttttggaccttttacagtcactacattgttctctgcaacttccacagttactcctgctggaattgcaactggcagtcttccgatacgtgacatacccatttcctccttaacttagattttcggaggagctgctctggctcctctgttttcagttacaattgtctatgtttcacacagaatatcttggtgttccgtgcgcctaggctcgaaaacacctcgccaacgcttgggaacgaccttctcactagactcagccggcgctgacgcttggctttgccaagtgttcagtgcctaccaaacgaagcagagtacttctccacctacgcccagttttctggcttctttatctgtgataacacctttgtttgtagaaaggattgctgttccaagtcctccgagtactctcgggatatcctctgttccagcatacacacgcagacctggtttggagattctcttcagaccagagataactttttcgtttttgtctgcaccatatttcagtgtaatatggattgtctcaaagtgtccatcttctacgatatcgtattttgcgatgtatccttcattgaaaagaatctcagcgattgcttttttcattttggatgcaggtacatctactgtatcatgtttcgcagtatttgcattacggattcttgtaagcatatctgcaattggatcgctcatgttcatttatatgacctcctatatgtttatacgggtagtttcctttgttccggacttaccagcttgcttttcttacacctggaatctgtcccttgtatgccagttcacggaagcaaacacggcagataccatattttctcaaatatgcatgtggacgtccacagattctgcagcggctgtattctcttgtagagaatttctgtttgcgctgctgtttgattttcattgatgttttagccatgaatttccctcctttactttgtgaatggcatattgaactgtgtcaataattcacgagcttcctcgtcagtcttagctgttgtaacgaaaattacatccatacctctgaccttatccactttgtcgtattcgatttccgggaaaatcagctgctctttaattccgagagcgtagttacctcttccgtcaaatgcgttcggatttacacctctgaagtcacgtacacgaggaagtgcgaggttgatcagacgatcaacgaactcgtacattctttctcctcttaaagtaactttacatccgatcggcataccttctctgattttgaagttagccactgagttcttagctcttgtaagaactgctttctgacctgcgattttctcaagatcagctacagctgactctaatactttcgcgttttcttttgcctcaccaacacccatgttgattacaactttgtccagtttcggcacttccataatgtttttatatccaaattttttgatcattgcatcaacgatctcattctgatactgttctttcagtctactcaaagttctggtcctcctttcccaaattaatcaattactttacctgttgattttgcaaaacgaacctttttgtctccatccattttgaatcctactcttgtaactttcttctcatgcagaagcattacgttagaagcatcaatgtagccttcctgatgaacgataccgccattctgattcgctgcgcttggtttcgtatgctttgtgagcatgttgattccttcaaccagaacttttccgtctttcttatttacagcaagaactttgccttctttgtttttatctttaccagcgataactttaaccatatcgccttttttaattttcatagctgacattctaggcacctcctacagtacttccggagctaaagaaacaatcttcataaagcgtttgtctctgagctctctggctactggtccaaaaatacgtgttccacgtgggttcatatcgtcttttataattacagcagcattttcatcgaatctgatataggaaccatctttacgacgagtactgtttacagtacggacaactacagccttcacaacgtcaccttttttaacaacgccgcctggtgttgcatctttaacagacgcaacgataacatctccgatgtgggcatatcttcttgtagaaccgccaagcacacggatacaaagtaattctttagcacctgtgttgtctgctactttaagtctactttcctgttgtatcatgcaggtaatcctcctttattttccattctttgaacgaatcttcaaagtgcgaatcaattatttcgctttttctacgatctcaacaagtctccatcttttgtctttagacaatggtcttgtttccataactcttactgtatccccaacgttacactcattgttttcatcatgagctttcaatttataagttctttttacgattttcttataaagagggtgtttaacgtggtcttcaactgcgacaacgattgttttgtccattttatcactgacaaccttgcctgtacgaacttttcttaaatttctttcttccacagtacgacctcctattcagctttagaagcttctgtgatcatcgtctgaattcttgcgatgttctttctaacttctttgattctgcttgtattatctaactggttagttgcattctggaatctcaggttgaagagttcctttttagcagctactaattcttcatttaattcttctacagattttgctcttaattcgtttacaaatgtattaattttcactgttatcaccgccttctaagtctgcgcgagaaacgattttgcatttgcaaggtaatttatgcattgcaagacgaagtgcctctctagctgtttcctctggtactcctgcaatttcgaacattacacgtcctggttttactactgctgcccagtactctaatgttccttttccactacccattcgagtttctgctggttttgctgttacaggtttgtctgggaaaattttgatccaaactttaccaccacgtttgatgtaacgtgtcatagcaatacgggctgcttcgatctgatttgaacgaatccagcacggctctgctgcgacaataccatactcaccatatgaaatcgtgttacctcttaaagctttacctttcatggtaccacggaactgtttacgacgtttcactctttttggcattaacattatttatcgctcccttccttatctgctttagtcggaagaacctcgcctttgtaaatccaaacctttacaccgacttttccgtaagttgtgtcagcttctgcgaatccataatcaatgtcagctctcagtgtctgaagcggaattgttccttcgctgtagaactctgtacgagccatatcagctccaccaagacgtcctgatacagatgtcttcacaccaagtgctcctgctttcattgttctagacatgcaggatttcatagcacgtctgaatgaaatacggttttccagctgctgtgcgatgttttcagctactaactgagcatctttatctggtctttttacttctttgatgtctacaatcagttttttgtctgtgaatttagcaagttctgctttcactttttcaatctcagaaccacctttaccgatcactacaccaggttttgctgtgtagatgatgatttttacacggtcagatgctctttcgatctcgatcttggaaacacctgcactgtataatttctttttcagaaatgttctgatcttgttatcttctaccaggttatctgcaaagtctttttctgcgtaccatctagaatcccattctttgataacgccgactcttaaaccatgtggattaactttctgtcccatgagtgtcctccttatctctcattcagcacgattgtgatatggctcattctcttttcgattctgtaagctctaccctgtgctctcggtctgattctcttcattgttggtcctttgtttgcataacactcttcgatataaaggttctcaacgttcataccgttgttgttctcagcatttgcaattgctgatttcaataatttttctattacgcttgaagcatatcttggattataagctaaaataccaagtgctgtctgtacatccttgcctctgatggcatccaaaacgtagcatgctttctgaacagacactctagcgtaagaaatcttagctgatggtcttgtatctttctgctcgtttctttctctcttgatttgggatctatgtccttttgccatggatgaaccctccttccgaataatctaatctatattatctgacttttgacttcttctcgtcttttccgtgtcctctgtatgttcttgttgcaacgaactctccgagtttgtgtccaaccatatcctctgttacatacaccggcacatgttttcttccgtcgtgaacagcgattgtatgtccaacgaatgatgggaagattgtagaacgacgtgaccatgtcttaataactgatttatcacctgcagcgttcatagcatctacctttttcagtaagctctggtctgcaaatggtccttttttaagtgagcgagccataggttctaacctccttgtaaactaaattatttgattgatttaccgtctcttcttcttacaatcatcttgttagaagctttgtttttcttacgtgtcttaagaccaagtgccggtttaccccatggagtacatggacctggacgaccgataccagtcttaccttcaccaccaccgtgtggatggtcgttcgggttcataacagaaccgcggacagtaggtctgatacccatgtgacgcttacgtcctgctttaccaacattgatcaggctgtgatctccgtttcctacgacaccgatagatgctctacaaatgattggaaccattctcatctcaccggatggaagtctcagtgttgcgtattttccttcttttgccatcaactgtgcgctgtttcctgcagaacgaaccatctgtccgccttttccaggatataactcgatgttgtggatctgtgtaccaactgggatttcagaaagtggcaggcagtttcctactcttacctctgcttctgctccgttcataactgtcattccgtctttcaatccttctggtgcaaggatgtaagccttctcaccatctgcgtagcagatcagtgcgatatttgctgttctgttcggatcgtattcgattccgattacagttgccggaattccgtcttttcttctcttgaagtcgataattctatatttcttctttgctccgcctccgcggtgtcttactgtgattttaccctggttgttacgaccagcttttctatttttagattccagtaaggatttctcaggagttgtttttgtgatctcagagaaatcagatcctgtcatctgtcttctggaaggtgtatatgggttgtatactttaattcccattactgtctctcctttcatttttcctaattatttgtttcacggatttgcaccgtttaatgtcaaatcttacagtccttcgaagatttcgatatctgcgctctcttctgttaactgtacaattgctttctttgtcttcgctgtttttccgaatgtcattccacgtctctttgttttaccatcaagattcattgtgttgacgctttttacttttgttcctgcgaacattttttcaacagcttctttaatctgagattttgtagcatctgtgtgtacctggaatgtgtatttcttatcagccatcatttccatgctcttctcagtgattaccggtttaaggattacatcataatactgaatgtttgccattatgcgtacacctcctcgatatttgcaacagctgctttagaagcgattactgtgttgtatttcaggatatcaaatacattgattgtatttgtttttgctgtctttacgtttgcaatgtttcttgcagaaagttcagcatttacatttccatcttccagtacaaccagtgctttgtttacgttcaggttgttcagcatgttctggaaattctttgttttgatttctccaaaattcatctcgtcaattacgataaatttgttctcagctactcttgaagtaagtgcagatttcagagctgctctcttttcttttttgttgagtttcatggagtaatctcttggtgttggagcgaatacaactccaccgcctgtccactgtggagatcttgtagaaccctgtcttgcatgacctgttcctttctgtctccatggttttcttccgcctccggaaacttcagaacgagttttcgctttctgtgttccctgacgtttgtttgcaagctggcttaccactgccatgtgtacaaggtgttcatttacttcaacaccaaacactgcatcgcttaaatcgattgtaccaacttctttaccttcgatattataaacagatacgtttgccatctgtgtgttcctcctttctgtccgtcagactagttagcctttacagtttctttgattgtgataagagatttcttaggtcctggaacggaaccttttactaacagaagattgttttctgcatctactcttactacttccaggttctgaactgtaatcttctttccacccatctgacctggcatctttttacctttgaatactttactcgggtctgatgccgcaccgttagaaccagcgtgacgatggaacttagaaccgtgtgtcataggtcctctgctctgattgtgacgcttgattgctccctggaaacctttacctttggagattgctgttgcatctaccttatctcctgctgcgaagatatcagctttgatttcctgagccaatgtatattcttcagcattttcaaatctgaattcttttacatatctttttccggaaacacctgctttgtcaaagtgtcctttttctgcttttgtcacaccatttctgtgtgcaatttcttttttaccgctcttgtcttttgtgacaatcttttctttcttgtcaacaaatccgacctgaactgctttgtaaccgtcattctcaactgttttaacctgtgttactacacatggtccagcctgcaatacagttaccggaatcagaactcctgtctcttcattgaagatctgagtcattccgacttttgtagccaaaatagctttcttcattataattacctcctgtgatttacagcggaacgctttcgcgctcatcctaaattataggattgttactgtctcattttgctgcccgcattttgtggactttcttatttgtttttcattttgatatcaatgtaaacacctgccggcatttccagtctggaaagtgcgtctacagttttctgtgtaggtgtagtgatatcaatcagtctcttatgagttctctgttcgaactgctctctggaatctttgtatttgtgaaccgctcttaagattgtcacaacttccttcttagttggaagtggtaccggtccgcttacctgtgctccgttcttttttacagtttcgatgattttttttgcagatgcatcaaccaactggtgatcatatgctttcaatgtgattctcattacttgacttgccataaaaaaagtcgcctccttttcgtacttttcacttcagtacgacaagcggtgactgtacactctcccgtgtgtgtcgtgagaaactcacacgttgtttcatacctttacctatgttcggtaagcagtaatcagttgtgattcgtacagtgacttgtcgccagtttcctaacttgacattcgctccacggaaaacccgctgtgtgatttctcactcagcagcaacctctcgcttcaacgctatcatgccacagctctcttagtataacggactcattctcatttttcaagtgtttttttcatttttttgtattttttttgatacaatcttaactaacaggatgaacctttccacatcatctgtttcacaccctttttccgcatctattataatatgtaggaatccttttctatttttccttcttttgtgcatctgtatcattcttcttttttaaatcccacagaatcggaacatatttttcaatgtcgtatcgtttcggaagtagcatatgtaacaaaaatcgcacaattttttcgttaacatttcacaatttcttgtcaaatcgtaaaaatccgcatttttttattctgatttcttgacactgaattttctgcgtgctatattaaaaccgacttatgaatgatttctaagtcatcaaccattttatttggttgctgttgcagttatactttcgccggctgtttcccccaagaacagtcttgcgacggtgaactccaatttatatatacatcctcattgtaggatattccccagatttgtatataatacaaactgcaaagcaacgaggaaaacctctcaatgacataccaaaagcaaaaagcacggtgaaaaccgtgctttttgcttgtcattttcactcacactgttgaaaatttcttctatttatgagaagataaaacaatcatatcgtacgaaaggaattctattattatgtggatagctgatcattggaaagattatgaagtgatagactgctcaaaaggcgaaaaactggaacgctggggagattatctcctggttcgtcccgatccgcaggtcatctgggacactccaagaacggacaagggatggaaatccagaaacggacactatcaccgaagcaaaaaaggcggtggtgaatgggaatttttcagtctcccggaacagtggcagatccactacggatctctcacttttaatttaaagccttttaacttcaaacacactggtctgttcccagagcaggcgaccaactgggactggttttctgagaaaatcaaaaaagccggaagacccgtcaaagtcttaaatctatttgcctacacaggtggtgctacacttgctgctgcggcggccggtgcacaagttacccatgtcgatgcctccaaaggaatggtgacatgggcaaaagaaaatgcagtatcatccggactgaaggatgccccgatccgctggcttgttgacgactgcgtaaaatttgtagaacgggagatccgaagaggcaatacatatgacgcgatcatcatggatccgccttcctacggacgaggtccaaaaggagaaatctggaaaatcgaagacatgatccatccacttattcaattgtgtacaaagatcctgtcaaaagacgccctgttcttccttgtaaattcctatacaacaggacttgcccctgctgttctgacctatatgcttgcaaccgaattaaagccgtggaacggaaaggtcgaatcccaggaaatcggtcttcctgtcaaaaataccggtcttgtgctgccatgcggtgcatccggaagatgggaaagcactcactaattgaaatcgagtaggagaaatttctcataattgagaaatttcgacctctcacaccaccgtgcgtaccgttcggtacacggcggttcaatcaacttaacaagtgacacacctttcggtgtagtagtctagcattgagattagtccgaatgaggctagtctcttgttatttattgcaatctgtacatctccgcaccttgctggtttcgcatatcctttaagatatgctgttttccatgcactccattgtggcgctcctagctttatcaaattctttgctctgttcttcggagttttccaatgtttccagatacacatacgcaatcgatagcgaatattactgtctaacttttcacacaaggttttcatacttcctatcttgaagtagttaatccatcctctgataagttcgttgagtttctgcaccttataggaattactaactccccaacttctactagtgagttgtttcattcttgccttaaactttgctactgatttatcgtgtggttttgctttaaactcgtgtgctctattgtcaaggtaaaatccaaatccaaggtatttaagtccgtttggtctacacaccttgctcttttccatgtttaccttaagccctagtttctcttcaataaacttcgtgatatttctcattactcgctttgccgacatttcacttcctaccataataatacaatcgtctgcgtatctgacaaagttcaaacctctttgctctatttccttatctagttcattcagcatgatatttgcaaggagtggcgatagattcccaccctgtggtgttcctatcaccgattccttgtattcgtcatctaccatgattccactaacgagaaactttctgatgattgagattacatctccgtccttcattgttttcccgattagggtcatcagtttatcatggtttactgtgtcgaagaacttttctaagtcaatgtctacaatccaatcgtaaccgtcattcatcatatcaagtgctgtgatgattgcctgctgtgcacatctattcggtctgaatccataactatggtcatggaactgttcctcgtagattggtgttaacacctgtgctatggcttgttgtacaaatcggtctgttactgttggtactcccaggtttcggactcctccgtcaggctttggtatttccactctgcgtactggttgaggtttgtattttcttgttctcaactgttccttgattgtttcgccgttctttgcaagatgttctttaaggtctgtgtatttcattccatccactccctccgcacctttatttcgtacgacttgcagatatgcctgattgaggttatcactggacaaaatctgctccattagactacttgtgttcatgcgttctttcctttccgtctcgcttgatttgaccattcttaacccgattggttacggcaaatgttgtcatttctgcaattcgagacatactcaaacttattgattgttcgcccctttgctccattcccattacaggaacttcttcactactatgggctctgctgacttctcacagttcgttgttactaggctaatgaaacctctgtgagacctccacgcttaaggtgcacgctctttctctccatatatccgccacatttactctgctgctacaaatgtgatagttattagacttcgttgtcttttgccaacttatctctcacagcctagccttatatgtgatttctgtccgtcggaccagagatttgcttacaacttccttcagattccacctcacggtggacacccttgctgttcagctatacacttcccactacctgggcgtgttcgggacttacacccgttagagcgcgcccatggcgcgcaaacaaaatgcagaaggcgctgacaaagcactctctgcattttttattttactttgatttttcctaaaactttcccaatcggtgctgaaatacttaaattcgctctgactggttttgcagtctctgattgattgatcaccaccagatattttcccccgaaataatcaataaagccagccgccggatacacaatcagggacgttccgccaatgatcagcatatctgcctgtgaaatcgcctgtaccgcattctgtatcgttgtcccattcagtgcttcttcatacaagacaacatctggtttaatccgtcccccacaggaacacatcggtactccttctgccgccttcacaaattcagcatcataaaaccgtccgcatttctcgcaataattacggtgaatacttccatgcagttcgtatacggtctgacttccagcagcctgatgcagcccatcaatattctgcgtaaccaccgcttttaactttcctgcctgttccagttctgcaagttttaaatgcgccggattcggctctgcatccaataccatcattttctcccgataaaattcaaaaaacgcttccggatgtttttcataaaaactgtggctcactacctcctccggtgaatatttataagactgatgataaattccatccgcactccgaaaatccggaatattactttccgtagacactcctgcccctccaaaaaatacaatattgctgctctcatcaatcatttcctgcagacgttcaacttctgcctcatacatctcttccactcctttgcctgtcacttaccacaaatcaatcctcaaacaaatgtccctgctcaatgtgtttctgaacaatctctttcatctgctcccagatcatctctgatgtttccggaatccgttcatttcttttatatacctgacctttatacacaccgtgctcttcccagcttttcccaccggatgcatcgtttaacaaaaggggctgaaaattatccaaaagatgcgcatactttgcttcggacgtctcataggcttcaaattcttcccataaatcacgaaattcttttccctggtcctccggcagcaaaccaaaaatccggtctgccgctttctcttccctctctcttttggttgccgcgccactttcgtcatatgcatatgtatcccctgcatcgatttccacaagatcatggatcaaaaccatgatcatcaccttcgtcagatcgacttcctcttctatataatctttcaaaaggactgtcataagtgccagatgccaggaatgttccgcatcattctctttcctgtttgcatccgcaaggtaggtctgccggaaaatattcttcactttatccacttctacaataaactggatctgctgttttaatcgtacattcaattcttctcttgatcgttccatgttatgattcctccagtaattctttcatcttgctgcacccatatcggtccagaaagtcttccattccttctttgatctcatcccggctgtaacagcttcgtatcagtacttcatccggaaagcagttcaagtatgcataaaatgccagcgccatctccaaatagtccatatcccccggcaccatttcctgataaagcagattttccgcttcattgatcttcccctcatctgccatacggcataaccgggcatacagatcatctcctgcatgatatctgttggttacatctagctcatacatgggtgtcttcttattgaataataaacgtcccagaacattggcaaattctttgatcatgcgcataatataatcttgttcgatatccatattaactgcctccttccaatgcatcccaaatttctgtgatgtattctgtttttattatacgctcgctgcaagatgtcagcaaccagaaatgcaaatgaattgaaatgcaaaatacggccgatccgtacctgcgatctgccgtatttgatatttctgttttttacttgctgtacagtatttctccattgctttcaatcactttttgataccagtaaaatgactttttcttatagcgattcatggttcctgttccatcatcattcctgtccacataaatgtatccatatcgttttttcaattctgcagttgatgcgctgacaacatcaatgcatccccaggatgtatatcccatgacttccacaccatcctgaagtgcttcgcccacctgcatcagatgatccttaagatatgcaatccggtagtcatcttctacagttttatttccattctcatcttcgatcagaacatccacggctcccaatccattttctacaatgaacagcggcttctgataacgatcataaaacatattcagcacatagcgcaatcctttcggatcgatctgccacccccagtcacttgctttgagtgttggatttggtactcctcccagaagatttccaagaccttttttctgtttttcaggatctgatgtcgcacagacactcatataataactgaaggatacaaagtctaccgtattttttagaatttcttcatcttccggagcaaactgaatctggattccatgctctctgaagtatcgtttcatatatcccggatattttcctcgtacatgcacatctccataaaaatagttacgatgctctgcatccatcgccgcgatcacatcatccggcgatggtgtcagcggatatgtcggcatactcagaatcatacagccaatcattgcgtccggcatcatctcatgcccaatttttgtggccaatgcactggctaccagttcatggtgtgccgcctgatacagatcctgttctgtcagtccttgcatatttgcaatcccaccactcatgaacggcgcatgaagaagtgaattaatctcattgaatgtcagccaatactttacttttcctctatatctcttaaaaacagtccgcacataccgttcataaaatccgatcattctgcggtctgcccatccattgtaagtctctgcaagatacaacggtgtctcgtaatgagagagtgtcacgagcggttcaatcccgtattttcggcactcttcaaatacacggtcataaaattcaagtcctgcttcattaggctgctcttcatcccctttcgggaaaatccgactccaggcaattgaagttcgaaatactttaaatcccatctccgcaaacagacggatatcctcttgatatctatgataaaaatcaatcgcctccagttttaaattatcttccgtcggacgctgtgttcgctctccccggatcccttttggcagaacatcctgcacactcagacctttcccgtcttcctggtaggctccttcacactgattcgctgcaactgctccaccccacaaaaaatttttcggaaacacactcatgctttcatccctgcctttctcaaacgttttctttttcttcttccacgatcagcagcgcatcgtaataaaatggatgcattgcgatttctgttcttccttctcctgatactgctcccacgcaggctcttcgcccggatacaagatctacagctttgactttgcacctgctgaactctttctttatcacaactttcgtactgtgcggcaaatataaaagatacctgccatcttctgtacgtgctatgcggatctgaggcgtctcattttttaatagctcctgcattggtgtcagttctcctgtatgcagttcactgatcatctgacggatcatcccataatcccatgcccccggaaactgcaacgcttcattccacggaaacggcgcatcaaatccctctcccaggatcggatttgccggcctgtttaatttctgccagttccatacgccatgtgctccataagtcacccccgcacaggcaccggaaagaatactgctccatgctgcttttcttgtatcttccgattgaaaacgcccatatattcttctgctgaatcccatctgctcataacatggctctgcattgatcagtggttttttgggatattttttacggaatttttccggcagaacatatgccatatcctgcccatccctgttgtgtcctgactggaacatataaaaatccagtttgtctaaaaattcctccgggagaaaatcatatccccgtttgatatgcatcgttttcagtgtgtgcggactcttttcacacaagacttccaatgcatcccggtaataggaaacagcctccggcgtatcaaagtcagtatcaccgctcacaacataaatgggttcaaattgatcaaatacttgcacgatcttttcggtatattcccggacaaattcctttggcataacattgcagtctgtaatcttgctgccccatgttcccggtacataatttagccagagcaccaccaatgccaactgaaatccttctttcactgcaatttcacacatcttggatgcatgctcataatatgtctcgttccactttgtaaaatcaaatctgtgaccgtcctcggtagcaaatggatatactccaatgtctgatatacaacgatcccactgcggcaatgtattgatctgcaaaacagtaaatccctgctcttttcttcttttcaaataataaatccactcatcctctgtgacatttgtaaatgcactccagatggtatctgccagataaaagaacggctttccatctcgtaaaaatgtactttgatcttcatttactgttactctgctcatgatgctctccttccgtttctatttagaaacacagtttaacagaatttccccatttttcacatggttctctgctgctgtcttaatctccagataatctgccatatttgtaacaataaccggagttgtaatatccagacctgcttttttgatttcttcaatcccggcttttaccaaaagctgccctgcttttacacgatctcctgcttttactttgacatcaaaacaggttccgtttaaagtcactgtatccatccctatatggatcaagacttctgctccaatttctgattttattcctaccgcatgtccggtcggatacatcacgctgatcacgccgtcacatggtgcacagatttctccgttttccggaatcactgctgcaccctgtcccaggattcctcccgcaaacgcttcgtctttcacatctgaaagtggaacgacttttccgctgaccggcgccagaagtgcttcatctttcgctggaagaacttcctgaggttcttctttcttttcctcttttttcggaagcatatcgtcactatatccaaagaaatatgttacgattgcagatccaaagtaagcgattgcacatgcaattagaaaccctgtaaatcctacaccaatatagcccggcaatgtcagaatactggttcctaaaatcgttggagcacctgcgcctgctgccgctacgattgctcctgcaattcctgaaaatacagctccgatgaaaaacggtcttttgaatcgcagtgtcactccataaattgcaggttctgtaattcctgcaagaattgcagacaatgctgccggacctgccagttccttaacagatcgatccttcgttttcaaaaatacaccgagcgtagcccctgcctgtgccatattattcggtccagtaatcgtaaataacgtatcacgtccatactccgcaatattgttcataacgatcggaacaaatccccaatgtactccaaacatcactgctgcaggccagatcagaccaagcacacctcctgcaataaccggatttaatcccaccagtcctgtatatccggatgccagcgcctttcctacaacatccgcaaccggtccgattgcaagataggttgccggtaccatgatcgccaggctcaaaagcggtattaaaaatgttttacacacagtcggcacgattttctttaatcctttttccagtttagaaagtgcatatacggaaatcacgattggaatcacggatgatacataacttaccaaaactaccggaattttcaaaaaggtcagggtttctcctgctgaatatgctgccgtcagatccggataaagcaatgcagctgcaattcccactgccacaaattcatttgccttaaatttttttgccgctgtataggcaagaaataccggaataaacgtaaacactccatctgctgctgcatataaaatacgataagttcccatatccgacttcagccacccaaaggttgtacataaaatcaataatgcttttaacataccggctccactcatcacaccaagtactggtgcaaaaataccggaaatcgtatccataaatgtatttaacagaccttttttctcgccggaagcctctgtgttatcctggttttcttttttcaaatctgtaacttcaaaaatcgcatcatacacatctgccacatgctgtccgattacaacttggatctgtccgccactgtcaagtactgtgatgactccttccagttgttccagatttttcttatctacattctgcgtattttttactttaaatcgaagtcttgttgcacaatggatcaaagcatttacattttccaccccaccgatatatctgacaatttcctttgccagattctcatagtttttcttagccatggttgcattcctcctgttttttgtaaactgtaacgcgcgttttttatctgaaaacaagataacatttcccgaaaaaactctcaatcccctttcattttttctgcaattttacagattttccctcctaatacgttccaattctgtctctaaatttatagaaaaacaacaggcatttaaattttctttaaatgcctgtccgcgtctgtttttatccatagatatattttgttttgtcaaacacagtctcgccttccaacagccttgtcttataatacaccctcataatttcttcgttctcatctttcatataacgaagcagatgtttcacagccgccatatgccgttttgtatgggttcccttgatcagcgtcaattcaaatcccggaagttctaccggagcaactgcatcgaatccaagcaaagaaatgtctctcggaatccgtatgttccgctctagaagtgctttgatcacgctcatggagattacagaactttccaaaataaatgcagtcactccacgcatcccctcatccagatattttcccatagaatatgccgcctcctctacattgctgccgagatgacggatacgatttcttgcatctccacactcccgttttgccatttccaacacaaacgcctctcttctttccagaaaattaaaaatatcaatattttccgctaaatatacaattctgctgtgccctttgtctaccagataatccactcctcttcgaatcccctcccggttatcaatcagaaaactgttgataccttcttcataaaatagattgtctccggttacaaggggaatctggagttccaaaaaaggataaatgtcagattttcccatctcggccgccataatgtaaattcctttgacattcttccctctgcattcagcaatcagattttccacctgttcgaactgctcctgaaacaaccgatattcaaactgatacccttcctgttccacgatttcttttatcatttcaatgacgggatgacgattttggctccgtttcatgataattccgtttttaatataattgatcatcatcacagtccccaaaacagcatgttccttcttttcaaaatccttccgtgctttttcctgtttttctctgacacattccagtattcgtcttttggtatttgcatttacacctggacgatcattgagcgccagcgataccgttgcctctgaaattcccagttcctgcgcaatttcttttgctttgatccgcatacgttcctctccctaatggaaaactttcaaaatctctcttaatctttctgcctcaatctgccccggagccgatgtctgtcccgctgcaccgaatgtcagtgcagaaccaaacacctctccacacattcggctgacaaccccgtcttttgccatggacatggtaatgatcggacggtctgcatacgcttctgccatctccaaagtcgccgcaagcaatcggagcacatcttttttattccttggcatcactgcgatcttcggcaaatcggctccaagtgcctgcattttctgaagccttgctatcatctcctctttagacggagttttttcaaaatcatgattggaaacaacaactttcactccacagctatgtgctgttctgatcagagcttccacgatttcttcccctgcagacaactctgcatcaatcaggtctgagattcctgtacgaatcaccttttcattcaattcctgatattctgcctttttgattgtctgctctccaccttctgcctgtgtacggaatgtaaacaacagcgggatttctcccaatatttctctcagattacacaacacatactcaacacttgcaaatgcaaacacctcttcataccagtctgctctccattccacgacatctggttttgcctgtactgccctctctgcattttctaaaatttccgatgtcgtttttcctactactggaacacagattttcggcatacccgctccaatctccagatttctcacttttacagtattcattgcttatcttcctcccgtaccactgttttttctttcttatactgtatcttatctgaaaagatcctgcaagcgcagcctttttatttttttgactctttgatccgtctgactcaaaacgacacttctctcagccattttgagacatcaaaaaagcaaccgtcctttttcaccagaaaaattacggttacttttcaccactctatcatttgactatttttctgatcatcattgcttcatatggtctgagcaccccattctctcctctttctttataattccagatcaggttttcgccatcctcccattccgtcaaaagctcacattttgccggtttatcactgaaattcccacataccagaacttctgtatctccttctgttcttacataggcaaacacctgcggatcttcttccatcaaaagtgtaaatgttccgtttacaaacacggaatattcctttcttaaccggatcagtttctgataataatgaaacacagaatctggatctgctatttccgcctctgcattgatggtcttataatttggatttacgccgatccagggcgttcccgttgtaaatcctgcatttgcctcagtcccccactgcatcggagtccttgcattgtcccgacccctggcatagatggactgcatgattgcttctttgctgtatccttctttcagacgctcactgtacatattcagagtctcaatatcctgatactgactgatatccgcaaactgcacattggtcattcccaactcttctccctggtagatatacggagttccctgcatcccatgcagcagtgtggcaagcatcttcgctgactcagcccgatattcccgatcatttccccagcgtgaaacaatcctcggcagatcatggttgttccagaacaagctgttccatccacatccgtgcagtttatcctgccatttggcaagaacctgttttaatttcaccaccggaagcgacgccacatcccatttcgactttccttcctgctgatccagaccaatatgctcaaactggaacaccatggaaaactcacttccatctggattgctgtattgtctggcacgttcaatatctgcgccccacgcttctcccactgtgatcagatctcctttttgaaacgtctcccggctcaattcctgaataaactcatgaagtcttggtccattgtttgtgatcttttgatccggctctttggcaatctgatcgatcacatccagtcgaaatccgcccactcctttgtccatccaccaaaggatcatatcataaatctcacggcgcactttcggattctcccaattcagatccggctgttttacagaaaactgatggaaataatactgtttcagctccggcacccattcccaggccggacctccaaatacagatttcatgtcattcggatatacgccggcttctccctctctccagacataatagtcatggtatggattctctttgcttttctttgcttcctgaaaccatcgatgttcatccgaagaatgattgagtacaagatccatgatgatccggatatttctcttttttgcttccccaatcagtttttccatatcttccagatttccaaacataggatcgatatcctgatagtccgaaatatcatacccattgtcatcctgtggcgatctgcagaccggagacagccagattgcatcaatacccagttctttcagatagtccagtctctgaatgattccctgaatatctccgattccatccccattgctatcctgaaaactgcgcggataaatctgatagaccactgcatccttccaccagtgttctttttttctttcttccattggttctctccttcattcctttcttcggatcaaagttccgtttttctgcaacactccatgctccagcttacgggaaaacagaatttctcccccttctttcacttctgccggctcattggaacaatttaacaatacttctaactgatttccgtcctgatccagtttgatatattctaccaaccggttttgtgtatactcatttggaaaatgaaaatacaagcttttacaagctgcttcctgttttcgcatattgatcaggctctggatcgtatgaatcttttcctgattttgaatatgatccatttcctcccacggcatacaccgtctacagtccggatcgaaaccaccttccattgcaatttctgttccataataaatacagggacttcccggcatggtaaacaacacggcaagctgctgataaaacagatccagatcatcaaaacgactcatcaaacgctgtgtatcgtgggaatccaaaagattaaacatcacattattgctttgctgcatatacatcgtatagcagcgattcaccatgtattcaaactcttccttttccattccccgatccagaaagaaatcatgaattccactcatcaacggataattcatcacagaatcatactcatctccacaaagccactggctcgcatcatgccatatctctcccagcagatacaaatccggcttgatcttctttagatgttcccggatttttttcaaaaaacgatgtgacacttcatttcctacatcaaaccggattccgtctatgtcaaatttccgaatccagtcttcgcatacctgacagaagtattggattacctcttcatgattggtattcagttttggcattccatctgtgaatgcaaaagaataaaagcggccgtctctcgtatctgcccgtttcccgagagtttcccaatttcggatcataaaccagtctgcaaatgcggatttttctttcttttccagaacatccagccatggagcaaatcgtcttccgcaatgattaaacacggcatccaccatgatccgaataccatgctgatgagcttcacgtaccagatctgcaaattcttcctctgttccaaaatgaggatcaatcacagtgtaatctgtggtgtcatacttatgattggattctgctttcatgatcggatttaaataaatcccggtaattccaagttcttccagataggacaacttttcccgaatcccatttaaatttcctccaaaccgctcttcattggtcacagcacctgtacgccattcctccacatctgtgtcatcttgcatacctgctcccctgcagaatcgatctggaaaaatctgataccagatggtttcattcacccaatccggtgtcacattgatatccgcaggattcatccatggaacagtaaaacactgcagcatcctgccctccatctgcatctgttcctctgtcagaaatccgtcttcaaagtaataccagatttcctctgaagatgtccataactcaaaataatatttgcatcttttatattttggaaccaacgtggttgtccaccagagctggtgacgcagacgttttttaaaacagatttcctcacgtgttccgatccacttctcattgccgccgagaattcctgagtcaaacggatctccgtaatgaatgaaaacccgttccacatcatatcctgttcttaaatttacgatcagctcattttcattcaatgcatagctcatctgttccgatgttttatgaaaaattccagcaaattgcatgttgtctctcctttagtttcggaatgtgatcagacttttatatcgcctcagttctttctttgcaagggcaaaatccggcattctccactcccagttcggtgatccgactgttcccggagtatttaaatgtcctttttttcccagtcctaaaatatccgccatcgggatgatggcatattccgcccgactttttaatgtataggccagaagacgatctttgatacttccctgtttgattccctggcgcgtaaggaatcttcgtactttccgcttcgcagcgcaggtcagattctgataccattccatcagcgtgtcattgtcgtgtgttcctgtatatacgatcatattttctacatcatgaaagctgtcatacgcatattttccttttgtttcaatggaaaacacaagaatcttcattcccttcaagtgatagtggtcttttagttccaatacctccggacgcaaatctccaagatcttctgcgaccagattaacccctggtatcttctccttaagcgtgtcgatcacttcatatcccggcgcttcgatccactctccttcgattgcagtcggacagcttgccggaattttccagaaggtatcaaatgcccggaaatgatcaatccggatgatgtcaaacagcctgctgctatatccgatccgatctacccagaactgatacttgttttcttttaaatagtcccagttatagatcggattgccccaacgctgaccggtggcactgaaataatccggaggtactcctgcgatgaaaaccggtcttccgtctgtatccagaagaaaattatcttttgccgcccacacatccacggaatctacccctacataaaacggcacatctcccatgatctgaattccatatgcattggcctgatctttcagcttcatccattgtctgaaaaatacatactgtaaaaacatgtggtattgggcttctgcttccaattccggcaagagctctgttttcgtatccggccacattttatcttcttgtttccactcattccaacatgcccctccgtttgcctgtttcagcgcacgaaataccgcatagtcagatacccagtcctgttttataaaattctgataggtttcagactcagattctccgttttccaaaaatgcctgaaatgctttgcgcagatatggttccttatacagacgtaccgcatcataatcaactgtctctgtatgctcacgaaatgcattcggacgctctttcaacagcccttcctcatacaacgtatccagactgatatacagttcatctcctgcacaggaagaatagggctgatacggagaatttccatatcctacgggattcattggcagaatctgccagatctttacaccgctttcttttaataatgtcagaaaatgatatgcttctgctcccatttctcccactcccgtacgagacgggagggaagatacaggcatcaaaattcctgtttttctcatgttgctctctcctttagcttttgccagatcctacagatgccagatatctctgttatattctgcaattgttctgtcggaagagaagaatcctgcttttgcaatgttgaccagcatcttcttctcccatgctttttcatcttcataatcagaaagcatctgttcttttgtcctgatataatccttcacatcaagaagtgccataaaccagtcttttccaacgatttctttatacagacgtcctaagttcaccggatctccaatgcggatcagatctttgctgatgataaaatctaccagctcctctaccattggatcattctcgtaaatatcttttgaacagtattctcctgtctcgtaaagtttgatgatcttttctgatttttctccaaaaatgtaaatattatcatcgccgacaagctgatggatctctacgtttgcaccatcttctgttccaagtgtcaccgcaccattgagcatgaatttcatatttccggttccggaagcttctttcgatgccagagaaatctgctcggaaatatcacatgcaggaatcagtttttctgcttttgtcacattgtagttttctaccatcacgatcttcatgtacggactcacttccggatcattgtcaatgagctgctgcaggcagaggatcaaatgaatgatatctttcgcaatcgtatatgcaggcgctgcctttgctccaaagatcatggtgatcggacgtttcggcagatttccttttttgatttccttatacttatagattgcgtacagcgcattcatctgctgtctcttgtactcatggagacgtttgatctgaatatcaaatacagaattttcatcgatttccacattctgtgtcattttcagatattttttcagctcaacttttgcttcttttttgatttcttttaatttggcaagtaccttttcatcatcctgatatgccagcagtttttccagttcttcggcatgttctatgtattttggtccgatcagttctttcaaatattctgccaggttgtgattacaatgtaccagccatctgcggaatgtgattccgtttgttttgttattgaacttctgtggataaatatcatagaacggcttcagttcagattcctttaaaatctctgtatgaagagccgctacaccatttactgcatatccgaaatggatgtcaatatgtgccatatgcacacggtccatctcatcaatgatatacactcttggatcatgaaaatctcttcttacccgtctgtccagttcacggatgatcggcatcagatgcggcaccactttctccagataagagattggccatttttccaatgcttctgccagaatggtatggtttgtataagcacatgttttgcttaccacatctacagcagtatctatattgaatcccttctgttctgtcagaatacgaatcagttccggaatcaccatggtcgggtgagtgtcattgatctggatacatacatgttcatgtaaatgatacagattgacgcctcgttcctctgcttctttgagaatcagctgtgctgcattgctgaccataaaatactgctgatagatacgcagaagctgtcctgcttcatcactgtcatccggatagaggaacaaagtcaggtttttctgtatatcttgcttatcaaactgaattccactgccaatcacactctcatcgacactgtccagatcaaacaaatgcagtttattacatccgttctgatagcccggcacatcaatgtcatacattgtagatttcagcgtaaaatctttgaatggaacttcaaagcttacattcgtccttgtcagccagctcttttctgtaatccatggatttttttcttcccactgtttattgtcggaaaatttctgcaggaacaatccgtcatgataattcagtcccacaccgtcaccgtttaatccaagtgttgcaatggaatccaggaaacaggccgccagacgtcccagacctccatttccgagagatggctctaattctgcctcttcaatctctgtcagatcgtgtccgtgctttttcaatacttctctgacttcctcaaatactcccagattgatcaggttattcgacagcagttttcctatcagaaattctgcggaaatgtaatacagttttcggtctccctcgttgtgtttcatgccctgcattttttctttcgaccactgcagaagtgctgtatagatttcttcactggatgcctctttgattcctttatggcaagtttcctgtaacatctgctctaattctttttccattgtcattctcccttctgatttcacattttatttttctttttttcaatctgttcatagacacgaagcaattccccaacactccatgcctgtgcaaaacatcctttggaagataccggattttttccgtcataaatttccggtaactgtccgatacacccttcccggagtgcacattctaaaacttccagctgctctttcacatcctgttttgcacattcgctgtatccgtgaactcgaagatacgccagataataagctcccaaaggaaatgtccagacagttccctgatgatatgccatatcccgctcttccatggccccttcataccttgggtgaaactgcggatctgcttcctccaatgtgcgcatcccataaaaagtatacagcttttcaaaaacagtttccactatcttcctttctttttccggctccaacatcgtaaatggcatcgaaagagcccagatctgattgcatcggatctgcgtgtcagcttctgtaccggaaatcaaatctttcaaacagtttttctccggcatccaaaatgtttctgcgaaagcagattttactttttccgccaattttccatatgcttccctctgtgtcttctcttccgtaaatctttccatgatcttcagagcattgtaccaataagcattgatttccactggctttccatgccttggcgtcgggaggatttccccgactctcacatccatccacgtcacctgggaaagaccttctcctgcacagatcagaccgtctgcatccatatggatcccaaactttgttccggtctgataacgtttcatgatccgttccatcacaggatacacttctctgacaaattcccagtctttcgtggcatcataatacaggtacacacaattgataaacaaaagtgctgcatctaccgtattatacataggctcttttcccccttccggaaaaagattcggcatcagaccatcccgttcattttgtgcaaatgtaaaaagaatactttttgcagtctcatattgtccggtggaaagacagattccgggaagcgcaatcatggtatctctgccccagtcctcaaaaaacggataccctgccagtatcgtatctccccctgtcgattcccgttttgaaacaaactgtctggcactctttgacagcgcccttccgatttcggaagaaaatcccgcccgctcttccaactgttttctctctgcttttgtctgttcaatgatttccttcgcactctgactggagggttctatctcataaaccacttccaaaacggttcgttttcctgactctgcatggatccggatctggtgatttgctcttgcatgtccatacgatcttcggccatcacagatatcatagcggtaaaaataagtctcttctgtctgtgcaatggctttcacctttccggttgtccgaaagtgcaatgtcattgtttcactttctaccgatttccccgtaaatgtaattttctgttcctgagaaagatcttctccttttggaacaaactgaaaaaacggagtcagtaccagttctacattttgatcgctgcgatttcgaatctcatagcgaagtgccacggtattcttttcctgcggcattccgatttcttttttaatctccacaccattgacaagaaatctccagattggagtatcttcataagagaatgacgccagatgcacatatccatcctctggttccttcccttgaaattcctgtgtagaaagtataaatttttctttcttttctgtcagaagttcctctttgagacgatgtatcatattatatctgcaatttggagctgtcatgcatgccatcaacaacgcatgatcattccttgacactgcacccgtcatcgtcatagaagaaaatcctccaagcccgttggtcatcagataacaattttccaatccacgttctcttgtcttccagtcttgttttccatacatccatttcattacgtttcacctgctttatttgtttttccaagaatcaaaatgctgaccggatctacatatatttgcttttctgcagtctgtggatgctcccacagccagcttttttctccatctgcaagaatttcccagattcctgcagaacatgttattttctgctgtttttcactgctgttatatacaatccagatacttttccaccgttgtatctgatcttttgtctggttatccacacagactccgacacatcggtctgttttccactgttttaaaatacgttttttcgcctgctcacttttatcacacaatcccggaagctgctttctaagagcgatcagtccccggtaatattccaccagttcctgttcctcatatgcctgtttccaatccagacggttgaccgtaaccggcgcattgtatgtattatccctgccaccttttgtccgtgcaaattcttctcctgacagcataaacggcatgccctgacatgtcagatagattcctgctgccagacgatactgctttcttcgcaggacttctgactttgttgtttcaccaagcttatcccataacgtatgattatcatgtgcggatacataactaatgatctgagacggcgctttgaccttgctttcactgcaccacgcacttacagcctccagcatgttctcttccagatttgtttcaccatttacaaaacccggaatttctgcttcaaacacagagcccttgatcacatctctcgtatcatctgaaaacattcccacttgtgaatccaaaagatgaatatgctctttgtccgccggaagcgcatttccctccattgccgtattctctgctctccacggttctccaaataccagtttttcccctgctccataccggatatccagctcctttcggatccgattcattaaatccacatccaacagccccatcagatcaaatcgaaatccatcgatgtgatattcttctgcccaatacaaaacagactccagaatgtattttgcacacattgtctgttcacttgccacatcatttccacaggctgaaccattggaaatccttccatcttcccatacccgataaaaataccatggcacagtcttctgaaaccaggactccagagaatatgtatggttgtacaccacatccatgatcacccggaatccctggctgtgcagtgactggatcgcttctttcagctcccggatccgaacttccccatgaaatggatctgtggaataagaaccttccggcacattataattcagtggatcatatccccagttgaatccatccgctctgcccgcctcatctacagatccatagtcatacaccggcatcagctgtacataattgaccccgagatttttcagataagaaagtcctgtcggatgttttccatctccatacaaagaagtatctttgcagcaaaatgccggatatttccctcttacctctacaggaaatccgccggatgcatcccaggaaaactctttgacatgcagctcatagattatttgctctgcttctttttccggcgctttatctgattcccacatcacaggatccgtttttctcaaatccaccgccatactgcgaaggccgttcacaccacaagcttttgcataagggtctgcactttgaacctgctctccctctatcttcagcagaaaatcataatagattccgtgaagatactgctttgcctcatagttccatattccatgctcctgcagctgcatcggatggatctcaaatgcacttccggtctctccattcttgtaaaaacagatctgtacttcctctgccaccggcgaccagagccgaaatgaagtccgcccacttgtgcactccattccaagcttttctgccggatcacaatactgtttctgaaattcttcttttcggtaaaagtctttccactgttttgctgtctttttcatgtttttcgctccatctatcctttgactgcacctgaaacaccgtctacataaaatttctgcatacacaggaacaaaattgcaatcggaatggaaatcaaaactgcacctgctgcaaaactggtgtaccagctgtcaatatattctttttccaacatcttccacagcccgattgcaatggtatactgatcggaatttgcacggcagattacttttgcgaaaataaaatccagccatggtgccataaatgatgtcaaaactgtgtagatgatgatcggtttactaagaggcaatgtgatcttcgtaaaaatctgccatctggtacatccatccaaaagcgctgcctcatcgattgcgatgggaatcgtatcaaaaaatcccttcgcgatttgaaatcctaatcccgctcctcctgaatacaccaggatcaaagccagacgaatcagatttccctctgtcaatcctatcgcttttaaaataaaatacacagcgatcatggacataaatccgggaaacaatcccagaatcattgccatattcatgtatggcttacgcagcttgaaccgtagtcttgacagacagtaagagacagccagtacataaaaagtagacaggatacaggaacagaccgcaatgatcaaggtattgccaaacattctcggaaagttcagaattgaagtatccgtaaacaatcttatatagttatccagtgtaaaggactgtgggaagaaggtggatacataagaacctttttccgcccgaaaacttgtaagaacaacccaaacaatcggaaatacccagattgcggccagcactgcaagagtgatatgaacagccgtattgttcaacatccgttttctttttgctgaatgaaatttcttttctctcatgcctagaatcctccttcttctttgtaagatttacttcttctgtatgtaaacagtgcaccaactgcaagaatgataaaggtcagaataccaatgactgcaccgatgttgtaatactgtttgtctactgtcagtttatacagccacgttacaagcagatccgtgcttcccgcagtggaagacagatctgtgatcggatcgcctcctgacaacagatatatcacattgaaattgttcacatttcccgtaaatgttgcgatcaaatacggtgtcgttacatagagcatataaggcagcgtgattttaaagaaaatctgaacggaatttgccccgtctacttttgccgcttcataaagatctgccggaatgttctgaagaactccggtcagctgcagcagcgtataaggaactcctacccagatattgaccacaataaccgtaactctcgcccaggtcggatctgtaaaaaacggaagacttgcatcctgtgcgatccagcccagatttctcagaagtacattgacggcgccttccggctgcagcatggtgcgcatgatcaaaagggatacaaacattggcacggcacaggaaagtacaaaacaaaatctccagaatccttttgcctttgtatctttccggttgatcatgatcgcaaggatcattccaaaaatatagtttgtaaaagtcgcaaagaatgcccataccaaagtccatacaagtactgaccaaaacgtacttcccagaatgctgccagaatcaaacagagctttgaagttttccaatcctacccagtcaaacagcatcagatgattgccgatcttactgtaattggtaaatgccatgcagatcataaagatcagaggcaggatcgtaaatccaaagataaaaatcatcgatggcgtcatcagaagtctgtgcagattttcatggagcagtgattttaaatcctctgcaaatgtattgacatgttttcctgcttttgcaagacattctgccttgtaagcacttcgaagtgcgcccctccatgcaaaaaacatcaatacactcaacagaatcgttgcgattccatatagcaggatcaggatcgactgatcgccttttgtatacagataaacctgacttgcttcatcccacacttctttttgcggcacactgccaagtccgcccagcatacttaaaaatgtaattccattgactgccataaatacgatatatgctgcctcgattgccaaatataacaacccttttaccttctgtccgtgtacaaaatttccaagtcccatcaagatcatagataactttgtttccatcccgccttcacggattgcatttctgcatgtatatggagttggaaattcattgacccgatttctaatcattcccatttttttcacctcttctagattccatcgctgttcattgcctcattcattgcttccgtctgctcttctgcattttcatgtgtgatacttccatttcggattccttttcccatattttcaaccggtacccagcaattgttcattttcgctacgaaaggctgaagaaccgatgtatggttaaatgtttcattctgcgccacaacaaccggattttcggcaattgtcttatcttccagaagctttgtatgacatggaaccacatttctgagttcgtaatgcgcccgctgtgcctcctcaccgcccagatatactgccagtttcactgccgcttccatatttttagcatttggattcactccgatcgccttcgaacctgcataggaatacatctgcttctcgattccgtttaacgtatatgtcggcaaagctgccactcccatattctctcccaatgcatcctttacattgttggcatcccaggaccctgaaaacatcgcatggatgcttccgtcccgcaaacctgcaattccggaaccatctgcatctatcttaaaatttgaattctttagaagatcgatcagataattggttacttcaactgccttctctccaccaaaatctgctccctttgattcatccgtcccatctccaaacaacgtacatccatttccaaaataaaaggctggcagattccacgaattggtaaacggaaatgctacggttcctttttccagcattgcttccagattttttacatcttcttctgaaaatacggatttatcataatacatataccatgtatttgttgtaaacggcaccccatataattcgccatccattgtcagtgattttaaaacttccggcgtgtttacgctttcaatttctttccggtattttccgccgaattttgccaatgcattcgcatcggtcagcatagtcaatgtatcatttgcatacataaatacatctgcacttgcttccggatcctgcgacacctgatttgctgcagtcgcctcatctgcaactccgtacacaaatgtaatatcccactgtggattttcttctgcaaatgattcgcacattgtctgcagccattcaccactttcttttgactgatcctctgacggagaccataccatcagtcttattttttcctgcgctgcatccgccccggatccattcccgcatccagtcagtccgcacacagccagaattgctgccagcaaaatcgcacaacctcttctcttcatgttccctcatcctttcatttttgtttcgtattgtttcgtatgcattgatgatatcacctctttttctatccgtcaatcccgacacgcaacacaccactatattttctatgttttgcatagttttttgtgtgtgtttttatacagtttcactaacgttttttcccgcttttgaaacttttcgaaacttttgttgtttttccattgtcattcattgcatttttttatttttttctatataatggaggaaaaagaacgtagaaaggagccaaaatggctacattacaagatattgctgatcgtctgaacatctcaaaaggtactgtttccaaagcattgaacggtgcgcccgatatcagcgaaactttacaaaaaaccgtactggaaacagctgttgagatgggatacacaaaaatccgccgccagaaagccgcccaaaaaaagctctgcatcttgattgaaaatgtagattataaagaaccgcatcaattcggatacgagatcctgcttggatttcgacagcttgcagaacctgccggatacattgtagacattgtagatactaccgaaaagctccaaaaaacgatcccctatgacgtgttcatgctgcaaaatcagtatctgggagcttttgttgttggattttcgctgacagatccatggatgaaagattttcaaaccagcaggatgccaactgttctgtacgacaactacattatcgcaaatccgaatatggcatatgttggaattgacaataacgaaggaatggaacttgccgtttcccatttgaaacaactgggacataagaaaatcggatatttgagcagtgcccttggttctcatatcatgcaggtgcggcacaaagcgttttttcacgccttgaggcaaaatggtctgaaatcggaccccacctacacgggcagttcctactacattacccaatgcatggaaaaacatcttccccgcctgttaaatcttgggatcaccggcatcatctgcagccacgatctgatcgccaatgcagcaatggtacagtgtcagcaacttgggtaccgggtgccggatgaaatcagcatcatcggatttgatgacctgccgatctgtgcatatacttccccaccgctgactaccatccgccaggaacgtacccagcttggcaaaagtgcctattatgccctggacagcctgatgaatcagatttcaatcggaacacttcttctgcatgcaaaactgatcgtaagaggatcgaccaaagaggtgctcccaaacaaagaataataaaaaaagtgcgccggctttccaattgcccacgcactctttttattccttataattcaatccgtcctgttgtatccttattgatcacgtaatatgctgcggattcttctggcttcaggtaaagttttacatctttcagctcacttactttatgtttcagttcttttgtccagacgtctttcacttttttcatcagctctttttcagaatattcttttccggcaaactgcagatacagttcacattttgctgctgtctttgctgttgtcgctgtctttgcagaagcttttcttgctcttggctttttctcttctgcagctggttctgcttcttgaagcacagctgctcttgtttcaattgcttttgttgtatccttctttgtctcgattgcttttgcctttcctgcttttgtctcaattgcttctacttttgcaggttttacttcttcttttttctcagttgctttttcatttacaacaacttcttcagctgtttttactgctgccttttcttctgctgcctttaccgatgtctgtactgttgtttttgctgttgttttagatgctcctttttttgctgccatatcaattccctcctgataaaacacgaaacggatattgctccgctgttactccctgatttttcacaggttcagacagtattgtaactcattttttcaaaaacgtcaaaaaaatatcaaaaatctacatttttctcctgtttctgcttcggatatccccggaaaaacaaagataatttatccagagtctgcagaagaatctccagttctttttcatccagattttctatcaccgcattggtcatctgcatatgaaaatttttatgatgttcatatgcccgctttccctttgcagtcaatcggatatagacaactcttcgatccagctcacttctctgacgcgtcacatattttttattgaccaggctgttcatagacgtcgtaagagaccctgctgtaattcccagtttctttgccactgcggacatcgtgctgtcttccccaggcccgactgcttctattatatgcatatcattgtttgtaatatcctgaaactcctcggttatgattgctttttcttccaattcccagatctcattaaacaagtgaaccagtgtatcgttaatggtcttatatgcatccaaagatgtattctcctctcgtaccacacacttctccctgtcttttatgcaaacagcgatgccacgacttcttctacggtctccatcttgtctgctttccatgcattggccccgcagaacaagagtccattatgagtatcgcctttcactgctgcgatcagagtatctgtaatacaatatggaatctgcaatggattgcattttgcaagacatctgtgacaaggactgtgttctattttctctccaagcataacacgtttcataagtggattcaagatggctcttccaggcattcccacagggcttttcacaattgcgatttcttctttttcagcgttcagatatgcttgtttataacggacatctgcatcacattcttctgtagtcacaaagcgtgttgccacctgtactccatccgcccccagattttccatttcttccacatctttgcgatcataaattccgcctgctgcgatcaccggaatcctgcagctatacttttcctcatactgttttacaactgtacagatgcgctgaaattccacaccataagattctctgtcccacttttccagttctgcttctgtaaaaccaagatgtcctcccgccaaaggcccctctgccacaatcaaatctgccgttttatgatattttctgtcccaatactttaagattacctgtgccgaccgtgccgttgaaacaatgggcgcaattttaaccacactgccttgtaccaatgcaggaagatcaaccggaagtcctgcgccggatatgatcagatctgccccggctcttactgcagcctttacatgatctgcatatccttttaatgcagtcatgatattgtatccaatgatcccgtcttttgaaatactccgcgcctttttcatctcctgctcaatggcacgaagattggccaattctggattttgatcaaaatccgattccctgtatccgatctgcgctgtagaaatgatcccgatcccaccggcctttgccacacttcctgccagccttccaaggctgatcccgacgcccattcctccctgaataagcggaatttttgttttcttttctccaatttgtaaattttccatggcactcttctttctatcttctgtttcctcacatttttcggaaacgttcataacgcctttctaccaatttttctttagacagcgtctgagatctctttaaaaaatttgtcatctttctgcgaagcactgcgattacatctcccatcgactcttctgtgtacgtttctggttctgcgatcactgcttcgatcaccccaagtgcttccagatctgccgccgtgaggcgcatcacttccgcagcttcactggcacgcttgctgtctttccacaaaatacttgcaaatccttccggagacaatacagaatatactgcattttccaacatccacacctcgtctgcaactgccaatgcaagcgctcctccactgcctccttccccgatcacaaccgataagatcgggactttcaaagctgacatctcaaacagattttttgcgattgcctctccctgcccccgttcttctgcctctatcccgcaaaaggctcccggtgtatctacaaataggaaaatagggcggttgaatttttccgcctgcttcatcaggcggagagccttgcgatacccttccggagagggcattccaaaatgacgttccacattttccctggtagactttccttttgcctgcgcgatcacggtcacaggaatccccgcaaaattcgcaattcctccaaccaccgcaggatcatctccataacagcgatccccgtgaaattcctgaaaatccgaaaaaagcctccggatataatcctgccctgtcggacgatcattttttctggaaagaagcactctctcccacgcatttttttcggaaatttcgtacattttttcttccatatcctgtacttcgtccacttgttttctctgttcggattcccgatgcatcttcaggatcattcccagggtctttcgcatgtcttttctctctacaattccatcaagaaaaccatgctccaacaaaaattccgctctctggaagccttttggcagtttttgtccgatcgtctgttctatgactcttggaccggcaaacccgatcagtgccttaggctctgcgaaaatcagatctcccagcatcgcaaagctagccgtcacacccccggttgtaggatctgtcaatacagaaatatacaaaagtcccgcatcactatgtcgttttagagccgctgctgttttcgccatctgcataagagaaacgatcccttcctgcattctggctcccccggagcaagcaaaaataagaaccggcagtttctcttctgtcgctcgttctatggctcttgtaattttttctcccacgatttctcccatgcttgccatcaggaaacgcccgtcacatactgcgatcaccaccggatttccctgaattcgtgcttttcctgtcacaactgcctcaaaaagtccggttttttccttgatatcttttactttttcctcgtatcctttaaactccagtggattcacaaattccatctgtgcatcccactcttcaaaagaatccgcatccactgtcatgcgaattctttcctttgcatgtacccgaaaatatcccttacatttgggacagatataaccatctcgttttacatcttctgtcaggatcgcagcaccgcacttgttgcattttttcaaaagaccttccggcacttccggacgttctcctttcagtggaatataacttttgcggttctttttaaacatattctgcagtttcatattcttgcttcctttttactgattttccatcttttcaataaattcaatatctgtatttccacttacaaaatccggatgatgcaaaatctcatactggtagtccacattggtctgaattccttcaatgatcacttcaccaagtgcactgcgcatttttaaaattgcttcttctctgttttttgcatgtacgattaattttgccagcatggaatcataataaggtggtaccgtataaccactgtagatcgctgtatcgatccgaaccccttttcctcccggcagatacatatccgtaatcattccaggagacggcctgaaatttttagacggatcttctgcattgatccgacactcaattgcatgtccatccaatacaatctcttcctgggaaaatgaaagcggcattccctgtgcaatacggatctgctctttgatcagatcaattcccgtcacccattctgtaaccggatgctccacctggatccgggtattcatttccataaaataaaatgctccatttttctccaacagaaattcgatcgttcctgcattggtatagcctgctgcctttgccgcccgcaccgctgcctcccccatctgttgacgcagttttggagtcagggccggagaaggagattcttcaatcagtttctgatgctttctctgaatggagcagtcacgctctcccaaatgtacaacatttccatatgtatctgccagaatctgaaactcaatatgtcggggattttcaatgaaatgctcgatatacatggaatcatcgccaaatgcaattttcgcctcactttgcgctgtcagaaaagcggactcaaactctgcctctgactgtgcagtacgcattccttttccaccgcctccaagcgctgctttgatcatcactggataccctacctgatcggcagtctgctttccgatttccacatcatagatgcactcgctgcatcccggaatcacagggacgcctgcctcttccatcgtttttctggcaacagatttattgcccagctttcgaatcacatccgaagaagggccgataaatgtaattccacacgcttcacaaagctctgcaaatttgctgttttctgataaaaatccaaatcccggatgaatggcatctgctccggaagtcaatgtcgcacttaaaatccgctccatactcagataactttctgacgattgagccggaccgatgcacactgcctcatcagccagctgcgtatgaagtgcctctttgtctgcttctgaataaacagccacggtcaaaattcccatttcccggcacgcccggatgatccgaactgcgatttctccccgattggcgatcaagattttttctatcatttcattcacctaccataaatgtcagttccgcacttgccacgacttttccatccacagatgcaactgcttctccaactcctaccgggcctttttgtcggatgatttttgtttccagtttcagcttgtctcccggaaagaccatgcctttaaatctgcatttttgtacccctccgaaaaatgcaattttcccttgattctcaggaacacttaaaattgcaactgctcccacctgtgccagagcctccaggatcagtacgcctggcatcactgccttctgtgggaaatgcccacggaaaaattcttccctgtaagtcacacatttatatccaactgcaaattctcccggctcataatcctcaatggcatccacaagcaaaaatggatgtctgtgaggaatgatctcctgaatctgttccacattcaatgctttcatattctgctcctttatctacttcacaataaaaagaggctgtccgtattcgaccggctccccattctccaccaaaatctcctgaatcgttccgtcaaactcactttcaatttcattcatcagtttcattgcttccacgatcgccagaacttttcctgtctgtacggaatcgcccacttttacaaatggatctgcattttctgcaggagctgcataaaatgtacctaccaaaggagatttgatcactttttcatcaccgctcttttccactttctgctgctgaacagcagcaattgccgatacgggttcactctgttttacgatcagtccttccccttttgctttctttaatgagattttgaacgcttcttcttcatacttaaattccccgatatcagaggctgaaaccacctggatcagttctaccaaatgttcaaatttcatatttttacactacccttcatattttttcagcaacagtgatgcattgtgcccgccaaatccaagggagtttgtcaatgcatatgtgatttcgccttccacaggagctccgactgcataattcagactgcactcttcttctgtttcttttgtccccattgtctggtggatgaaaccatcctgaatacttttcacacaagtaataaactctactccgcctgccgcacccagaaggtgtccgatcatggattttgtcgaattgactacaacatgatccgctgcttctcccaatgcataccgaatggctcttgtctcatacagatcattgtgatgtgtacttgttccatgtgcattgatgtaatcaatctgttccggggctgcaccggcttcttccatcgcaaacttcattgccattgctgccccttccccagtttcttccggagaggtaatatggtacgcatctcccgttgcaccatatccgactacttctgcataaattctggcaccccgcgcttttgcgtggtccagttcttccaatacaacaattccggctccttctcctaatacaaatccattccggtctttatcaaaaggaatggacgcccgaagcggatcctctgaagtagaaagtgctgtcagcgcagtaaaccctgctacaccacttggacaaatgcagctctctgccccacctgccacgcaaatctccagatctccataggcaatcgcacgaaatccgtctcctatggaatgcgttccggacgcacaggcagtcacaacactggtacattttcctttcagtccaagatggatggaaatatttcccgctgccatattggaaatcatcaacggaaccatcaaagggttcactctggaaggtcctttttccagaattttctcatagttggtctctaccgcatgaaggcttccgattccagagccgacgatcacacctgcccgatatggattttcccggctcatatcaattccggcatctgcaaacgcttcttttgctgctgccactgcatactgagaaaatggttccatacgttttgccgccttaaaatccatccgttccttcgcctgaaatcctttgacctctgcagccagttttaccttatagtccgaagtatcaaatttagtgatggggccaattcccacctttccctgccggatactgctccagaactcttccactgtatttcctacaggtgtcactgctccaagcccggtcactaccactcttcttttcatcctgttctccttttacattgccataccgccatccacattcaacacatggcctgtgatatattttgctttttctgatgccagaaatgcgactgcttctgccacatcttccggctctccaaaacatccgagaggaatctgagactttgcatgttcctgtacttgttcagaaagaatccctgtcatctccgttcggataaagccgggagcaactgcattgactgtaatgcctctggacgccagttctcttgccgctgattttgtcagaccgatcactcctgctttggatgcactgtaatttgcctgtcccgcatttccaagcactccggaaacagaagaaatattgatgatccttccctgtttctgacggagcatctgtctggatgcgaaccgaattccatggaatgttccttttaaatttgtctgaagcactgcatcgtagtcttcctcagacatcttcatcagcagtccatcccttgtgattcctgcattgttgaccaaaatgtccagtcttccgtacgttttgatcacatccttaaaaaatgcctcacaggcagaaaaatcggaaacatcacaggcatagatttctgcgttcccgccctgctctctgattgcctgctgtacctcttttgcccgttccacactgccccggtaattgagtactacaaaaatcccttctcctgccagtttttctgcaattgcccgcccaattccacgagatgcacctgttacaacggctactttctgctctaacataacttacttcctactttctctatatcttcccatgctgatacctgatatacctgcacattgcggtcaatcttccgcaaaaatccggacaaggtacgccccggtccgatctccacaaaagtatctgtgccctgtctgatcatttcttctacactctgctgccagcgaacggatgctgtgatctgctgcgcgagcaattcttttgtttcgctaatatctgatacatactgtcctgttacattcgtcacatatggaagatccaacggtaaaaattcaatctgatccaaaacttctctgagctgtccggatgcttctttcaacattggtgaatgaaatggtccgcttacatttagtggaactaccctctttgcgccagcttcctttaaaacctccgctgcctgctccacactttctttccatccggtgatcacaatctgtccgggacagttataatttgcaatgcttactccttttattccggaaattccttcttcaatgcttcttccgtccagaccaagtactgcggccatggcacctttcccatccggaaccgcattctgcatcaaaatccccctctttcgaacagccagtatcgcgtcctgtatccgaagccctcctgcagaagcaatcgcacaatactcgcccaggctcagtcctgccgtcacatccggctttgcacctgtgcttcgcagtacctgctcgattgccatacagactgtaacaagtgcagcctgtgtatattctgtctgatggagatgctcattctcctcaaagcacaatgccttcatatccagtttcaaaagttccgatgctccgtcgatcacttctcttgcaatctcactgtgttcataaaagtcctttcccattccggctgtctgtgccccttgtccgggaaacataaatgctgttttactcatgttctaaaactccttttaacaatgcctctgcctgagctgtcatactttgtatgatttcttcacaagtcagcacttctttgaccattgccgcagactgacctgccatgacgcttccatttgtcacatcaccgtccacaaccgctttgcgaagcccacctaatgtcaacagctccagttcttcaaacggaacccctgcctgttccttctccagatatacttttgtcatctgattgcgcagtgcccgaaccggatgtccggtgcttcttcccgttacccgggagtcaatgtctctggcctttacaatacaatttttgtaattttcatgtacctgtgcctcttttgatgccacaaaccgagtgcctgcctgcactccctctgcacccagcatgaatgctgcggccattcctctgccatctgcaatcccacctgccgcgatcaccggaatgttcaccgcatccactacttgaggtaccaacaccatcgttgtattctctccaatatggccaccggcttctgttccttctgctaccagcgcgtctgctccgcagcgctccatccgttttgcaagggcaacagacgcaaccaccggaactactttgattcccgcttctttccagagactcatatacttttccggggaaccggcgcctgttgtcacgaccggcacctgctcttgtactactacccgcgccacttcatcggcatagggactcatcagcataatattgactccaaatggtttttctgttctttttttcacttcccggatctgcatacgcacccactctgccggtgcactggcagctcctatgattcccaaacctccggcattcgaaactgctgctgccagatgactttccgccacccaggccatgcccccttgtacaactggagattctattccaaaaagtgtggtaatttttgttttcatgctggtttccttcctctatttatgtgcttccagatacgctgctacatctcctactgtctggatctgctccagatcttcacttgggatttccacttcaaatgcttcttcaaatgccatgaccatttcaaacaaatccagagagtctgctcccagatcctctttaaacgatgttttctctgtaattgtttctgcctctacacctaatgattctgctgtgatttctttgattttttctaacataatttttccctcttctttcttttaccattcaaacagacttcccacccaggaaagtcctgctccaaatcctgcaagcaccagtttgtctccttttttcagaagttgttttctgttccattcatccagaagaatcggaatgcttgctgcggaagtatttccatattcctgcaaattcatggggaatctggaactctccactccgattctcctggctgcagcttcgatgatcctgcgatttgcctgatgcaaaaagaaatacgaaatttcctctttttcaatctgcgccgcttccagaagctcttccacaatctcaggaactctccgaaccgcaaatttgaatacactttgtccatccatccggatatacgctgccccggcttctttcgggagatcccagccttttctgtgtctgctgtacccggtaagaacactgccctttgcaccatcggaatgcgctgcctgtagatacaatccactttcctctctgcgaagcactgcagcgccggccccatctccaaataaaatgcatgtacttctgtcactccagtccaccacgtgcgacatactgtccgcgccgatcaccagcacagttttataactgcccgactgtatataggcctgtgctgtctgaaaagcaaacaaaaaaccgctgcatgctgcattcagatcaaaacacgccgcatgctctgcccggatgattcgttgtacttcacatgccgtacacggaaaaatactctccggtgttgaagttgccaccagaatcagatcaacttcctctgcctggatctttgcctgttccagtgctctctgtgccgcctgagccgccatatatgaggttgtctcattttctgcaagatgtcttctcgcaatgcctgtccgttcacggatccaggcgtcatttgtatccaccagatttgccagctcttcattttctacaattctggccggcacataagatccggttccgcatattcttcctgtcatctttcttctccattatttttgtttcaaaatatttttattttaaaatactttgatattcaaaatatatcacaaaagataaatttgtcaacacctttttttaatccaaaatggataaatagtatgaacaattaaaaaaaataaaaaaatttagatttttttgaatttaggggtttacaaatccatttcactatggtattatacattttgtcaggcagacagctgacaaaaacgcggaagtggcggaatggcagacgcgctagattcaggttctagtgggagttaatcctgtgagagttcaagtctcttcttccgcattggtgttttggaaagggggctgtaaaaaaacttccctaatagaaaaatcgcccagaccgtgaagtctgagcgattttttggtataatgaattatgctactaaatcaaaataccaatgataattatacagctcgtcagctgaaattaccattagaaatcgaaaaattaattgatatttctgatccggtatacactttttgtgaggttatggatcacatcgacctatcaagatattttgtagagaaaggctacaaaacaggtcgcccaagatgtgatgaacaaaaactgcttaaagtgatactgtttgcttttatggaaaaaggtatttgttcgctgcgtgaaatcgaaaaactatgtcgcaatgacattcgttacatgtatcttctcgacgaaatgaaagcacctacttttgccactttcggaaatcttatccgaaatgaactgactgattccatagaacagatattcatggacataaatgcttacattttttcaaaagatcatgtggatttgcagcatacatatattgatggtacaaaaatagaagcaaatgccaatcgttatacatgggtatggaaaaagtcttgtattaaaaatcgtcagaaaatttttgataagatatctatcctgattgatgccatgaatcaggaagtacttggatacctgggactaaagcttgaaaagcgtgaagagtatgcgattaattacgtttctgaattgttggagatgtataagagaggaaccggacttgatgaaaatttgttcgtttccggatgcggacacagaaaaagcattcagcaaaaacaataccaggaactgcaaggctatctaaaacgtttaaaaacctatgcgcgtcatatagaaatctgcggagatgaaaggaacagctattcaaaaactgatcaggatgcgacttttatgcgactgaaacgtgattacatgggaaatgaccaactgctcccagcgtataacctgcagacagccatctgcgatgagtacatcgccgtaatcgatgtaaaaccttatgcatcggacatggaatgttttgtgcctttggtggaaaaattcaatcgttcatatggtcattatccgaaatatccggttgccgatgcaggatacggttcttacaataattatctttactgtgaagaacacggcatggaaaaatatatgaaatttaccatgtataaaaaagaaacgacggacaaaaaatatcgtgaaaatccatatcgtgctgtaaattttacaaaagatgcagatgggaatctcatatgtccaaacggacagaaatttctcttcaagagaacacagcctgtgaaatataataaatatggaagaacggaagaactgtacgaatgcgaatcctgtgaagggtgtcctcataagcaggaatgctgcccgagggcacataaaaatcggaccatccgaatgaaccaggagttaaccgctatccatcaggaagttctgaacaatcttacgtccatacatggagctcttttaagaatgaatcgaagtattcaatccgagggtacttttggtgtgttaaagtgggataaatcgtataaaagattatttcggagaggcgagaaaaatgtaattctcgaacttacactgatttcatgcggattcaatctttataaatatcacaacaaaaagcagcggcaaatgaaggttgcttaaaatttaagcgtgattggctgaggcttattaagtataccattttttctacgaaaaggtgcatgtatgagcagaaatgggaagattcatacaaagaaacgccagttccggcaaatgccggttctggcgtttcttaatcagaggctttttttacagccccttttttttgcgttatcaaacatcgccgccactacagcacacactatatttgattagtgacttatttttcaataaatttcatagaaagagggtaccacacgatcatcaaatctgatgctcgcgtgataccctgacaaatatcatttttctcactgccattctctaataatggtatctgcatgaaataatatagacattttttccatcaatcttataaactagccgatctttttcattgattcttcgactccaaaatcccgaccaattccctaatagtggttcaggttttccgatgccagaatttccatttctgcaaatatcttcaatcagcttgttaatcttcttcagcgtttttctatcttctgtctgccaataaatataatcttcccaactgttttttgtaaaaactttattcatcctcagaaacctctattaactctttcatttgaagcatcccttcttccaactgacgtttggattccatcagccatttatagttctcttcatttccgataagatgcatattttccatcatgttgttatatgtttcttcagatatcatcacaatgtttttattttttttacgcgttacaatcagggtttcaaagtcatcagaaaccttatccatacatttcttcatatttcctcttaattctgtataattcactgctaacattgctttcaccccctataacaaacgtacgtttttctgtacttatattatagtatacagcattttataaagtcaatacaaaaaggaaatatcttatttttttaatctcttccgctgctgctcacttttttgcgtcatccttaaatatgaacttcatgatcgggaagaatacccaaaatgatatgatacagttgatcagcattgttacaatatccgccacaaaagttcccgttccatctccaagcagattgaggaagaagtcatacaccggaaccttataaagcccctgcagtgcggacgcaccaattgatatgatgacccacgcaataaaataccatactgctgcttttacaattcccgtttttgacttaaaggttacatttctctgtaagaagaaattgataacctgcgcagcaaacaatgtaatttctactgcaagaaagtatgccattccgcctccgccgccctgtgaaatacttccagctgtataatcaaacacataatatctgctgccgtccaggttctgtcctatcggaagaacctggaaagcggtattgactaaatctgtaaaactgaacaagtatttgatcaatggcattaatatcatctgcagtacggtaactccgttgctgattataaaaaataccaggaactctgaaatctgcggatatttatcacagaactttcgccacttacttttttccagtctaatttctgccatatttactcctttaccactgcccggattattttatttttaaacagacaaagaagaaagattacggcacagatgacagtgatcacaatactcggcattctcactgttgcattggttccagacgttaaaatatatccaatcgaccaacttaagatctgtacatctcctaccgccagtaccataattacaccagaaacgattcctaccgacgcactgacgatcatcaaaatcagccatacaagattaaggccgttgtgattggccagtgcttccgcttttgcattctgcttactcatccttttctcctcccttctttttcgggttacagcaccatgctctgtatgggagattggcaaaaattgcaatcgctaccgctgccagaactagatcgcctaagatccagaaccacatccatgtagaaaagcttccctgatattcatacatatccggggcggaactgtttgcatatacatacagcattctctttgcggattctctcatttttgttacggcatagccactctttaatgtttcatctgtataaccacagtttccgcttgcttttgtcagcatcaggtcatttccagctctgactgcatagtccggaagcatataatatgaacctcccggtcctactccgtctgtgatcactttcccgatcatgccccattctgctctcggaagtaccgtacaaagggcgtatgttgctccactccatgatgttccgattcgtccaagctctgtcataagacctgtacatccgccttttttgattgcaagttcaaaagaacgtgcatagatttcacgaagcgtctgctcattacaccagtttgcaacaccatctctatttgtatcctgcgtattcagcaaataatgtttggcatatacatagactcctacactctgaatccccgttacttctgctgctgcaaacagtcccgcatgcgttgggtcttctgagtaatactcaaagtttcttcctccaaacggagatctatgtgtattcatagccggtgcatataaacctgaaattccccagttcactgcttcctgtccataaatctgtcccatcttttctaccagttctgtattccatgtcattcccatcagaacttcagatgcataggaattcattttcaatcccatatcattaaagctaaatccgtttaatccctgcggtccatcaatatctaccgtttccggtttctctatagaatccacttccggtgtggaccatcctgagtttccgcatatctgtaccaattcatccagcgtcaactgatccagaagatcgtcccacttttcatcgtcataatccagaccgatcatatcattgatcgtcagtccattatctgctccaagagtcggcatttccactgaatcatcatctctttccatgaccgtagaccccggaccgtttgcatccaaacgctcttttaccgcttccggaatttttgtcggattcagccgtctttctactttcgggaatgttccttcaaaatcagcacgtgtcagatatgtcatgtttgtttccagtgttgctgcatcctggaactcttcctgtgtcacagcagccacctgatctgtggaacgttttccgtcattttcatcattataaataatcgtgtcatcctgctcatatgtaaattccagatcatccttcacggtatgagaatctgtacgaagtgagaacacatactctcctgcatccatcacataacatccattttctttttcatcaaaagatgccatgtcatcaaacaccatcgtcagagtcacactctgagactcgcccggctgcagctcctctgtcttggcaaacgcacccagattaactgccgacttctcgattccaccttcaatataaggtgcactgtaatacagttgaaccacatcttttcctgccacatctcctgtattcgtaacttccactgtacaggtgatatttccgccctgtccgtctacctgataatctgtcagtttccagtcaaatgttgtatagcttagtccatatccaaacggatactgtacaatactgtcataatcaccaaagtcatatgttgtatctccgattttaacaactgctttttcttctgctgctgtttcataccagcggtatccggtataaatattttcttcaaaatagaagtatttgtcagacatttctgtgtcataatcagaatagtagcagtctcccatattgtaataagacggcgcgctctttaaatcatacgcatatgtatcaaccagatgtccactcggattaacagctcctgtcagaacatttgcaacaccacgcatacctgtcgcaccaggtcctgcaatctgaagtgcggcatcaattccatcatcctccagaaatcccagttccatcgcatgggaagaattaatcaaaacgatcacattgtcaaaattttctgttacaaggtctaacagctcctgctcacagctctgaatttccagataatgtttccctttgtctccgccaacttctgtgtattcactcatatccagcggacagtcttcaccctcgccgccaactctggagagcactacaatagcagtatcactgaattcctttgcagtctcaatatgatcggaaacatccgtacacttgctgtcatatacggaaaaatccgctccattcggattaaacacatcccattctgcactttctgtgtatttgcttgaatagtaatcccagaggtcttcattgatctcaagtccttccccttcaaaggattcttttaacgtctcgttttcttcacttccacttgttgttccgcttcctgcaccaccatatacaagatctacactgcggtatccgaatacgttgatcttatttgtatccaatggtaaggaatcattttcatttttcagcagcgtagcaccttctgccgctgtttcctgtgtaacctctcttgcatcttcaaatgttgccagtttctcctctttggttgccgttccgctgtcttctgctgaaacctgactgttaaggttccagtaataggtaattgtatcagaatatcgcatcaatccaatatttgccacaatcatgataatcaataccaatgatactgcacaggaaccgatcacaccaaatttctttttgaccgggtgtctccatcccatccttttttcctccttcttttgctttttcaatcttctctcctccttttcttctgtgatgagacgattataaaagacaaaacaaaggctttctatcatttactccccaatgacgtttatgatactcccaatcttccttctcacggtacaaacggcagtgaaacaggaacaatcgttacaacagacagcttccctcttcctgcatcaattccatgtacacctcttttacttcctgcagttttcttctgcttaccggcacacagtctccactgtccaaaagaatatcatttccctgaaatatcctgatatgtcgataattgaccaaataccccttatgtacacgcaaaaatccctgattttcaagctccctctccaattcatgaagtgattttttcacttctgtaggtattacctgatctactagataaatctgctgaatctttctctgaccctctatatacaaaatgtcctctatctcaaatatttctgttttttcttttccttgaatcacaagctttttagaaaacgcttctgctctacgttccagatagttttccataactcccggtacatcctctaaaaaatgcttttttcggataaacccaaccggattaacttttaaagaatcaaacactttatcttctctgttagatacaaaaataatatcaatacgggatttttccccccgcagttttttcccaaatgtaatcccatccattcctggcaggtcaatatccaaaagcaacaaatcaaactttgtctgttccattttcttttccaaatccttaaccctctgaaacactctgatctgcccctgtatcttcttattccgaagcaccatgctcaccgcatcttgtattagatccagcgcaaacatatcgtcatcacaaattcctatctttaactgttccatattcccctcgtacctccatcataatatcggctgtaaaaacatgatctttgatcttatatttgacatgtcctcgatatttctctgtaatcatctcgattactttcgttccatacccatgaatcttctgattactttttgtagtttttaatttcagacgctccttctcggaaatactgtcatccacggaattttgcacccgaataaataaatatgcacctcgctgtctcatctgtagagaaagaaacggatctttgatccttgatgacaaacatgcttcgattgcattatttaaaaggttaaacaaaaggctgcaaagttctgtctctctgtaaggcaactctttcggaatgatgatctgactctctgttcgtattccctctgatctcgctctagatatttcataattcacaattgtattaaccactgcatttccacaattcacatattgatacaactccacacgttttgacatactgctattcaaaaattcttccagtttaccgtattcctttttcttcaataatgctcgcatatatgcatcgtgattttttatttcgtgacgtatagcactcatctcatggtaaatatttttcgtcaccacatacatctctttgtccagttccgccttttgctgcattgccagaagttccatattttccgtatattctttagaaatcacatatagcatatagtatgccaaaagttccaataccagaaacccactgctgatcagcatgttataaagccggatatcctgcatcctgtcatctgccatccagtcataaatcacttgagatcctcctgctaccaaagagatgataagcatcagtgacaccccatattctggttcaaatgagaatttttctgtggaaaatcgtttcaaataccaccccataaatacaaacagcaaaatattgacaagcgttgtaattcccatatatccatatgccgaaaagccaagtgtactgatcaaatctccccacggttctgagattacaatatttaaaaatgctgcagaataaaacacacttcccataataattctagtagaatatcggtatctgcttctaaaaactgcatatattaccatataaagcaaaagcggcagccaatttttttgagtttctcctatgaccatatatatataactgtttatcaaaaacaaactgaccaccgcaagtgtgatttcctctattttctttaccattccctcaaaagtaagtctaatgggattcatcatcaaaaccacaactgccgcatacacaatctgtgtgataatatatgattccccatacgttttttcaaaaaaatagactctaaaatactctgtcatagtttcctcttctctcattcatatatctaatataaatttattgtgcgtatttttctaaaaaaagtcaagtttaattccaatcagtacagcttccacatttttaaaactcataagtcctcggacaaattaaataaaaaagaaccccgtcaccgacgagattcttttactatccaccttttaaaggtatcctccgtatccactgccatagcctccacagcacaatccacttccgccgcagcacagattacacatcatattcgcaatgcacagcttcatacaccagtctcctcctacagaactcggatacccgtacatactctgtctttgctgataccagcctccacctccctggagccgctgcaaaagcatctgatactgcatattctgtggctccagacgaacagcctctttggcatgttccagtgcagtcacgttattccccataccggaatttgccgatgcactgtagaaataccacagagccccccgctccctgatactgtttagcacattgagcgcctctgtatagtgtccactctgtatgtaatttgctgctgctcttaaatactggctgttctcatcatctgtgccttgctggctctgataccagcctccataccccgcactgcttcccgccccggaggaatatcccctggaacgctcgtccataatctgctgatatgcctgctgcacttctttaaatttcgcttccgcttcttctttcaatggattattgatgttggcatccggatggtactttctgctcaatgtccgatatgcttttttaatttcttcgtccgaagcatcttctgatactcccaacacatgatatggatctgtcatgccctctttttgctcccccttatactctgtccttttcttttctctcagcttttcttaataaatgtagttccacacttcggacagcgaatctcaatcctgccttttcctcttgggatccggatcttctgtctgcatcccgggcaagtatagatatggtactctttcctctgcgacataagattcttctgtcctttgaaaaatccccgtatctttgctgtcttattcaaaaactttacattctcatcataacgctttctcacatttctggaaaacatccggaaatatgcatagataagagctgcccatccaagcagataaaatacaaccccaatcgcatgatctccggtaaagatcggcgcaaaaaatgccagcgccaatcccagtattaacaaaaactttccaagtgcatccagcaccccgtaccgcccttgcataaatctcatcaatttttctttcatcgtatgcattcccgccttttcttaaatatagaaagtattgtctctcgtttttccctggctgtcaataaagcaatccttaaattactataaactttatgacagccggaaagaatttaagattctgtatcctgattcaacatatttttgcacttttcaatttccacacgatatacgatctttgaatccgaaagctgcacataacggtttccttttccgtcttcttttcccaaatacaaagtgatggtcttttccttctgatcactggtatatgtcgcagtctctgttgtccgattctgttcatccagtccgtattttccaaggtctgtctcttccacagaatagtctgccacatctgtaagtgtcaacacacccagaccgccggcaatcgttgccagactctttgtgtcatcttcctgctcggaatcatattctattgtatttgttccctgactgatggaaaccttcttcaggtttccactgccaatagacggaatggtatcaagctgtgccatatcctccatactatattgaagattttccacaacacttgtattcactgtatagatttctgttttttcattcagggtcagatagtaggaatctcctgtcacatttccaaaatacaagacagtctgtctgccatcctgtgcagtcagtatcaccgtatactgcggctcttccaaaccatatgcttccagagaatctccgttttccagttttctctccacctgcagttgttcaaatgttttctccatctgtttcggataactctgatccagcggaaaagctctgtcatttttatcgtaccacgttttgtcttcctttataagctggatctctccattacccacatcaaactgaatgccggtgagcgtctctatatccgtaacatagattttttttgcttcctcttcctgttgttttttttcttcctgtctgtttcccatgcgtatcacgacagcgtaaacaacaagcagcactgccagtatggccagcaatagcaatagcggattttttttctgcttcattgtctttgttctccttttgatcttctatgcttttctccgcttcatccacaccgcaaatcctccgaaaagaataccaagcggcagaataaaaattaccagaatactgagaaaccctgcatgctgcattgtattataaaccggtgccagactttttgcttcgatggaaagatcttctgttccatcaaaattggcagctactgcattcataaacagttttgtattctcaagctgagggaaagtatctgtaatttctgcagaaatcaaacttcctgcactgattaccgtaaatcgggcagaatcctcctgtgccactgcaccgagcacatagcttcccgcatcactctgactgtcttctgtcacagcatatgcattgtcagatgttgtcaaaaaagaagtggcagaaatactctctctctcaggatcactgattgtcattccatgtgtattgagaagcaaaagcatctgtgactccattccatttgtcaactccccggaagccgtcagctgtggaaagaaacagtaataattgttctgataacttctctgcgtatctgcgatataaccgtccacactttccattccatatgttttcatgaccgatgccaggttgggcagttccgtactgtttgtatctcccaaaagcagcatcagctttccgccttctttcaagtacgtttccacagattttttttcatcctctgtcagatctgatgacggagcatacatcagaagtaattcacagtcttctggaattgtcggattcatcaccgtattgactccctccagtgtataattgttcttttccatcagatcctgaatggtcgaagacagcgtctgttccccgtgtcccgacgtctgataaatcttgcgctctacatcacttgtcacgtaattgactgcactgctaagctgtccctctccgtcaaaccgggcttccgatatggttcctgtataataataagaagacatatccgcaacaataatatcactaaaagaaacgactttcgtcttccccgtatcctcacatgacactacaatactgttttctgcagcatcatattctgtcagcgcagacggatgcagaaccggatcgatccactctacggaaattttagaagataaggccgcatatttgctcaaaaatgtcacaattctttcgtctgtttcttctttatttgccagaacggtaaatgtcacgttatctttgacattttgaagcagctttttactggtcttggaaatatcgtaaatttttgtactgctgacatccagattcttatacttttccggaatctgacctgcgatcaaattgacgaccacaatgatcacaatcaccaatgctgtaattcccacactgtaagatccgtttctggactctgacgacctgaataaattcttaattttctgcatactctgctcctcctaactccaacgtcttttctgaattgtctgtatcgtcagaaatacaaaaatcaccaaaattgatacatacagaagcagtccactgatatctacaatattactggatgaaatattcataaacacatctgcaagcgcaagacgtcccagaagctttgtcaggagattttcatacaggcttgattttacaaaatacacaataatcgccgctgctgctcctgccacttcaatgcctgccgccaacatccagtttcttgtcatgtggtagatatacacaactgccaatgtcagaagcaatagaattccgatcaggccacttcctgctgatgttggaagaaacgaaagaattccatcccacagatacaaaagcagcaaaattccaaacgtactgatgaatgcaataatctggctttctgtcagggatgacatgaacatcccaattgccagatatacacacccaagcagaaaaaagaccgcaatagagctataatctacaagaagatatgcggttccctgcaattcgatcagaagtggaaacaaacagaagatcatattcggtactgccagaaccgttaccatggcaagatacttcccaagtacaacttttgtcagactgacaggtgctgtcagaagcagctgatccgtttttgtttttctctcctctgaaaagctgcgcattgtcaaaagagggattcctaccagaaatacgatcaaagcacctgacagtgtgtaagagaaatacggatatcccgcattcaaattgtatgccataaaataaattcccgtaaacatcaccagaaatgcaataaatacacatcctgtcatggactgaaaataagccctcagttctcgtttataaattgccagcatttgtccgctcctcctctcctactgcatcattttgtgtcaactctaaaaagacctcttccagactcacacgtgaggtctgcagctcaagcagcgggcactgctgtctcgcaaatgcaaggaagacattttctctgatatcatatccgtgctccacctgaatttttgctgcacaagtctgatctgcccgctcctgcgtatgcagactctgaatatgctctacctgcaataaaatttcccgcactctgtcagcacattcttttgccagaatctccacggtctctgtcccgttcattgtttcctccagacgatccggagtatcgcttgcaaccagttttcccctggatatgatcagaatgtaatcacatacttctcgtatttccgcaagaatatgagaactcaaaataaccgtatgatttttcgcaagttcccggatcagctcccggatctcaataatctgtttcggatccagccccactgtcggctcatctaaaatgatgatctccggaaatcccagaattgcctgtgccagcccgactctttgccgatatcccttggaaagattccgaatcagacgcatttttacatcttggagcttcgtcatatgaatgacctcatcgattgcagattctctctcttttttcgggattcccttcaattctgctgcaaattccagatattcccgaactcgcatatccacataaagaggcggtatctccggcagatatccaatatgcttcttggctttttctggttccttcaaaatatcatgtccatcgatcagcacctccccttctgtggcaccaagataacctgtcatgatattcatcgtggtagactttccagccccgtttggacctaaaaagccatagacccgccctttttcaatcgtaaaattcaggtggtctacggccatatgatttccgtattttttcacaaggttctttacttctatcaaaatctcgtcctcctactccctgttgtttacaggattttcctgtttacaagaaaaaacgataccagaactttgtgaagtttttgtgttataactgtgatatagttttgtactttaattatgcctgctttctttcccctttttatacaaaaatccgactccagccagtatcactgcagtcagtatcaccccctcacttctattttcctttttggcttttgggggcttttcttcccgaggtacttctgcctttacagttgttgcgtctacctgactgtccggcatctccctctcataccctacaatctgtgacctcacgatttcagcgatcagatcctgcccgttctgatccgggtgcagaccatccttctgcacatgctctgtcacctgggaatccgcaagatctgcaatttgatatccatactcactgcttcgtttctccagaattccattcatattcccaatgatattctccacgacctgattcatggtgcccggaagtgccatctgcttcaccggattgtagatatttgtcacgatgatctgtacatcttcttttttgcaagccgaaatacgatccatcgcagcgatccactgtgtctcaaattcctgataatcccagtttccaagagcatcaatgatccgaaaaatcagaagtgggttgcttttgacctgctctcttacttctgcaagagcctgatttgcactcctaaattttgtatctgtattcagaatttcctgtgccgacttcttaaattcattcaaaagatcattcgctcccattgtgatcagaatcacatccgccttggaaatactttcctgtacttggggatctgccaatattttttcctgaaattttctggtagcaagtccattctttgcataattctcatatagatatggtctgcctgctccctgagaaagtgattctgccacactctgtccatagcagcaaagttccggttgatctgctcctgcatatccttttgctatactgtctccaagtactacgacatgtaccggttccttttcttcctccgccgcacttcccggcatattccacgccaaaaaagagcacactactgccagaattactcccccaactgctttttttctcatgtctgtcacttcctgtctgttataccataaaattccatttcacatggcttccatggtctgtttttttcacttccagctgccattcaatctgctctttcagctcattgacatgggagataattcccacaagtcctttttcacctgccagctctttcaaaatctgaatggctctgtctctcgccatatcatccaatgatccaaatccttcatctacaaacatggtctccaggctcactgctccagctgtattctgcacaatatcggccagtcccagagccatcgacaaagaagccataaaggactctccaccagagagtgttttcacatcccgcacagaatcattaaccagatcatatacatccagatccagccctgcctgcccctgactgcttaaatttccgatttctctgcactgcagaataaattcctgaccggtcatttttgccagacgcacatttgccgcatggatgatctgacgaaagtattgacgctgtacataagtttcaaaatccagttttacacttccacttaaatttccatttgccgtccggctcaaatttcctaatatttcgtattggcggcgcagtttttgagcatctgagaaatcacggatcagcgtctttctcgctctttggttgatctcatttcttgtatgcagcgtcatgttttcttctcttgaaagacgcagcttttcacggacagcagccaactctttttccagcgtctccacagatgccatctgctttccttccgtttgctgtttaagcgtatcgtatctggaagatacttccaggactgcagattcatacttcttaagattggcctctcttgcctcccgtttttctatccacctctttgcctgctcatactctttctgactttgaaagtcctgattttgaaactctctcaggaagtattcttcctcctctttgactttcttattccagataatcagctgggattttttgctttctgcctgtccctgaagcctgcttttctcctggatcaattgttgataatctttctgtctcttttgaaatgcagactgcagttttttcaaatcttctgtcaatttctgtaactgtctttccgcctctttttcctccagatccgcttctgttttcccttctttttccataacttcggctatcatgacctgctcggactccaatctacctttgaccgcttgaaaacgctccagcacctgcatacgatttgcctcttcccgatcccggatttcttttgccttctccacctgctctttgtccggtgcctcttgggatatgactgcttttttcggatgactgcaggagccgcataccggacaaggttttccatcctgcagctcctgtgccaaaatacccgcctgttcttcaaaatatttctgatacagctgctcatattgctgcgaagcatcctgacattttttcagacagtgctgcatatcttgttctgattttcggtactgctgcttcagactgtgaagctgcctcaacttgggaagtatctcctggatccggagaatctgttcctgtattttcggctcttgctgtttgagctgctgttcctgttcctgatagaagactcttgctgtttccaattcctgttcatgctgtttcaattgctgttcaattgcacaatacccttctttcaagcccaaatactctgcctttgctttctggaactgctcctgcgctgccgccactttctgagcgcggcttccgtcccgtatctgtctgcgcatttcttccgcttttgcttcctgtcctttcaatatttccagctgttcctgcgtttttttcagcaattcaaataagcggttggtttcttgcctgcttttgagttccatctggagcgcatctgcctgcttttcttgctgctcattcttctgtcttagttcttgctctcggatttctccactcttacagatccactctacacaatctaagacttccttttgagggggaatctgtaattttaacaatgcttcccacggttcttttctcacatcttcttctgtaagctgcacccgctccatttcccgcttacaatccatgttgtttttttccaattgaacagacaattcttttgcctgttctttcagcgtatcctgaatcctccagaatatcctggtatgaaaaattttcgaaaagatctgctttcgttctcttgactctgcatgcaaaagtttcaaaaagtcaccctgcgcgatcatcgcgatctgtgtaaattggttcacgtccaatccgatgatctcctctattttcaaatcgatttcctttttctttccctggaattcactgccatccggaagcagcagactgacttttgcagtttcttttacaaacttcatagttccgtctgcattttttcgtttggaagggcgcagatattcgggattgcgtctgaccatgtacttctgattcctgtacaaaaactgaaattccacatacgtatccgtatctgaatccgcatattgactccgcatcatattcccatctcgttttcccccactggttcttccataaagggcataagtcactgcatcaaaaatcgttgttttcccggcaccggtatctcctgtgatcagaaaacatccgttttgtatccctgtaaagtcaatctgttccaatccacggtaagatccaaaggcagacatcgtcaatttgactggcttcatctattcttcctccatctcttctgtgatcttctgcatcacctgctgttcctcagcgttcaatgctcttccctgcatctcctgaaaaaaatctccgaaaatctcaagaggagatgccatgcgcaccacttctgcatctttcatcagcttttttcttgtacgggaattgtccatacgtacttccagaatatgtgaaaatatcttttccagctgctccttcggccgatatggatctgtttcatctgtcagcgtaatactgacatagtcctcttttgcatcttccggaactgttttcaacaattcctccaaagttccccggaactttttcacatctctgatcggatgaagtggatacgtctgcacttctacaggggctcccttttcttttaatgtcaccagatgcagcgacttcgtctgattgctttcgctgacagaatactttagcaacgttcccggatatcgaatcgattctcttccaactttttgtgcactgtgcagatgacccagcgccgcataatcaaacgccaagagaggtgtaacgtccacattgtcaatccctcccacagaaaaaatctcagaatcgcatgtcttcgtatcttgtcctgtccctgtataaaactggtgcgtcacgattacatttcttttttcaggatcgatcttctcccgttcaagaagcatctgtactgcctcgctgtagccttccggcatctcaccctcaaacaccgtccttacatatcccggtttcaggaacggcagtaaatagaaattcacatcaccatatgcatcctgcaaagtcacctttttcaaaaattctccactgttttgcggaagttttccggcaatgtaaattcctttctgtcccagtatcccgctggcataatccagtctctgcgccgaatcatgatttccgctgattataaaaatcggaagtttcggttctattccagagagcgccgtcaaaaaatgatcaaaaattcccactgcttccgcagacggcacagacttgtcatacacatctcctgcaattactattgcatccggcttcagctcttttacatactctacaacttcacccaggatgtgttcctggtcttctttcaacgaatactgatggagctgcctgccaatatgcagatctgacaaatggataaacctcatctttactttccccctgtatctataatttcaatccccgatatcgatcaaaacacgcaaaaatctcctgcgttctgggacgtgccatattggcaacaacagaagtactttcgcaaagtgcggcaagagattctctctctatcttctcttccagcaaagctaccacatctttcacagtacgttttccatccagcaaatgccgctgtgcataacttacacaatatccaagtgctgtcacctgttcactgtccgtgatctgttccacatatcgcagatcgatggtttcccgattgatggatatcgcttcttttcccatggtcttcattttaatacggtcattgcctttccattcccgtccctgctgcggcttccgttcaaaatctggtctgcacgccttcttccccggtccgctcagctgtggaaattgttctgcttctcttttggccatcttcgtaatatcctttggaacgtatcgatccatctgtataatacaatccgcaatatgaaaatacgccccggagcttcctgccacgatcacagtagaaatcccttcttcttcatacaattcgcggatgcgttcgatgaacggagtaattggctccatctccctgtgaataactctctgcatcaattcatcacggatcataaagttggttgcactggtatcctcatcaatcaacataactgcggtatctgcctccattgcctccacaacatttgccgcctgtgaagtactgccactggcatcttctgtgtaaaaatgtctggtatcctttccatttggaagatcattgataaacatcgaaatatctgtctttttgatgcttcttccatcctctgcacgcagtttgactgccgtagcatctgtgatcacgtattctcttccatcccctgcgatatggttatatactcccagttccaatgcctttaaaagtgtagactttccatgatagcctccacctacgatcaatgtgatccccttacggattcccattcctttgatcacacctttatgcggaagggaaatttctacctctagctcttttggtgactgaaaacagacagcttgtttcatcggacgcgcagaaacaccggattctctcggcaaaacagatccatttgccacaaatgcacacagccccatttgaggaagcatctcccgaagagcctgctgatcctctgccagattactgaccttctgcactctttttgcatcacagtttttataatacagggactgttccacacatttcggaagaaattcaaaaaagatccgaatccactccctggcattgatcgtccttccatttgctggaaatccaacctccagccggatccgaatatctccactttttgcatcaatctgcgcagcgctccgctccagaacttcctgtccgcatctgctgactgcgatcatcccactctttccggatcccttcgcctgaaatccaaacttctcgcaacatctcccaaactgtcggatcagctcgtcttccaatgccgtcttctgccacttggtagagtacaacttctctggaaatcctgctgttttccctttgatacagatacttacttttgacggggatgcaaacggatctccctgtacatgatcaatggataactgataccctgtaaactgatacactcccctcgtctctttataggcaggatagctcttgtggtcaattcttgtcacaagctgtcttaattcttctgctgtcttcatatttttcctccattacaaaaatccggacacgattctctttcaaatcgcatccggtcgtttctttcttttttcattccctaaacttcgaagatcaaatctccgtaagaaggcatcggccatgcctctttgtccacgatcatctccagtttgtcgatcggttttctcaattcttccatagccgggcacacttcatcatggtagaagtttgcctgtacagggccttcttctttggcagctgcctgtgctgtcacctcttccaggtgtgccagagctgctcttgactctttcaaaagaacggtgatctcctcaagagcttctatctgcacactggcatccacacctgcttcctttaccgcaagaacggtatctgccagcgtctttgtatatttgatcactgcagggataaactgctttcttgccatatcgatcatcgtacgggcttcgatgttaatcgcttttgcataactctcgtactggatttctgcacgggattccagctctgcttttgtaaatactccgaatctttcaaacaatgtcactgctttctctgtcaccattgccggaattgcttccaccatggatttaatattaggaagtccacgtctttcagcctcttctacccatgcatcagaatatccgtctccattgaagataattctttgattttccgtcgcatactctttgatcagatcatgcactgccaactggaagtcatctgccttttccaatacttcacaagcctctgcaaatgcctctgccacaatcgtattcaatacaatatttgcagaagcaacagaatctctggaacctaccatacggaattcaaatttatttcctgtaaacgcaaacggtgaagttctgtttctgtctgtcgcatcctttgtcaattccggaagtgttcttacacctgtctccagttttcctccttccagactgtgggttgcctctcctgtactgatcagctgatcgatcacatcctccagctgctctccaagaaatacggaaatgattgcaggcggcgcttcattcgctccgagtctgtggtcatttcccggatctgcagccgattctctcaaaagctctgcatgtttgttgactgcttttaaaatacaagttaacacaagcaaaaactggatgttttcatgcggcgttgttcccggatccagcatattgattccgtcatctgtaatgatggaccagttgtcatgctttccggaaccattgacacctgcaaacggtttttcatgaagaagacatttcattccatgctcacatgcgattctttttaatgtctgcatcacaatctggttgtgatctaccgcaatattcgcttctgcataaatcggtgccagttcatgctgagccggtgccacctcattgtgctgtgtcttggaagaaacccctactttccagagttcaatgttcacatcacgcataaaagcagcgattctctggcggattgttccgaaatagtggtcgtccagctcctgtcctttcggaggcatcgcaccaaacaacgtacgtcctgtatatattaagtcttttctctgaaggaatttttctgcatctacaaggaaatactcctgctctgccccaacggatggagtcactttctttgaagttgtatttccaaacaaacgcagaagtctgagcgcctgtacattcaatgcctgcatggaacgaagcagcggagtcttctgatccagtgcttctcctgtataagaacagaaagcggtcggaatacaaagtgtagctcctgctgcgtcctgtcttacaaacgccggagaagtacaatcccatgccgtatatcctcttgcctcaaacgtagcacgaagtccgcctgacgggaaagaagatgcatctggttctcctttgatcagctcttttcctgagaaactcatcagcacttttccgcttggaagtggagctgaaataaaagagtcatgcttttccgctgtcacacctgtcaacggcaaaaaccagtgtgtataatgtgtcgcccctttttcgattgcccattctttcatctcatgtgcaatgacgtctgctgtctctatatccagttctgttccttcttcgatcgtctgtttcagcttcttgtacacctttttcgggagacgctcctgcatcactgtgtcattgaaaacattttccccaaaaatatccgctacattgaataattctgtgctcataaaactaccttccttcatttcacttttgtaaacgcattttctaaaaaaggcattccaagcaagcttggaacgcctttgttctcatctacgaggcttagtatacctcaatcaccgcaaaaaggcaagttaaaatttctaacaaatacttattacttacgcttctgcttttccaacagagccaaacagctccattttttcttttacagttgccatgattgcatctgcgcctggttttaataatttacgtgggtcgaatccctttccttccaggtcttttccagcttcgatatatttgcgtgttgcatctgcgaacgcaagctggcactctgtatttacgttgatcttagcaactccgaggctgatcgcttttttgatcatgtcttccggaatacctgtaccaccgtgaagaaccagtggcatatctcctgtcagctgctggattgcatccagagtctcgaagctgagtccttcccagttctctggatattttccgtggatgttaccgattcctgctgcaaggaaattgataccaaggtcagcgatcatcttacattcctgtggatctgcacattcaccttttcctacaactccgtcttcttctccaccgatagaaccaacttcagcttccagagacattccgtgctcttttacaactgctaccagttcttttgtctttgcaatgttttcttcgatcggatagtgagatccatcaaacatgatagaagaaaatcctgcttctacacatttcatacatccttcgtagctgccgtgatccaggtgaagagcaaccggaactgtgatgttcatctcttctaacattccctctaccatacctactacagtcttgtatcctgtcatatattttcctgcaccttcagatactcccaggataaccggtgatttgcattcctctgctactgtcaggattgcttttgtccactccaggttgttgatgttgaactgtcctactgcataatgacctgcttttgctttctgaagcatttctgttgctgatactaacatattttttcctccaattctttgcgcacagccgtctgggcgtcgcatactataggtttcactctatggttttcattatatcttatctgctcttaaaagacaatctgtaattattacaataaaatccagaatatgtaccatttctttggcagattctgttatttttttaacaagtacacatccatcatttctataaaaaaatgcctgcagaataactgcagacatttcttaatagtgactccaaggggaatcgaacccctgattccagcgtgagaggctagcgtcttaaccgcttgaccatggagccgtatcttcatcactgcttcagtgatgaccgagttatatattatcacagctccatccaaattgcaacccctttttgaaaaaaaattatttttattcaattttgtttcattcacaattacttttcttccaaactctctggatttttcacttccggctcatccagaagctgcgtattctcaattctcccttttacagaaagctgctggatcatctgcggttttaccataatccgcattccctgtttccagttccggatattcacacaatcatgctctcctccaaattctccatccaatgtccatggaatctcctcaatcgattcaaatctcacttcaccagatttaaaagaatacatatgagtggagtcaatctgcttgatcagaagagaggcaactatctcatttaattcgattggatttttcggtgtcttgatcagcgttacttcaaattctccatcatcaaatacaacttcttttcctatgattcctttaaatccacctacagagcgtgagtttgtcaccattccataaacaaaatcatcttctatgatttctccgtcatgcgtaatttttatatgataagatggaatattaaaaagccgtttagtaccttccaacacataagccaaatgccccaaaacgtttttcatactttgtttcgtttcataggaaacatccgtaaacaatccgaatgctgcaatgtatacaaaatagtcatcattaaatactcccacatcacagggaaacgggactccgtttgcggctgtatccgcagcttccagaagatctttcgaaatatgcagactgtttgcaaaatcattggtcgttccggttggaatatacccgatcggaaccggattttttctccttgccatagcggttaccacttcatcaagagttccatctccgccgctgcatactaccacatcgtattcttctttataggactctacctttgtcattgcgtcgtgataacactgtgttggatatactgtcacctcatatccaccctttacaaaaatgtccaatacatcagataacttcggctttaatacccctgttcctgcattcggattatatatgaacaacatttttttcatatcgctctctcctgtctttccatttttgaaagggctgtgcccacgcacagccccactcactattacatcatctatctggtctttttcaaaaaagtcttaattccttctgcagccttttcttcatcttcgccctctgcaacaactgtcacttcgtcaccctcctgaagagcaagactcatcattcccataatactttttgcgttgatctttttgtcatccacctgaatgtagactttgctggcatactggcttgcctcctgtaccaacaaagcaattggtctgccttcaatcccatcttcatgccctacaataaccggtgtttcaatcataataatcctccttgttttgcctttccttttccgccagatcacttaacttccttaatctgtggtttaccccagattttccgaccggcggcgataaaagttcccccagctctttaagcgttgcatccggatgtgaaagacgcgcatatgcaacttcttttaatccatctgccagcttttcaagtcctaccgtgtcccgaagatatgtgatatcgtctaactgttttacagcagctgacacagttttgttaatattggcagtttcacaattcaccttacggttcactgcattccgcatatcctttaagattctgatattttccaactccatcaaggaaatatgcgcttccattatatttaaaatatctgctatctgatcgccttcttttaaatataccacgtatgatttttttctccgcacaatcttggcatccatcgtaaaatcacacatcagtctctgaatttgcttcgccatcatgtccgaatcacacacgatctcaaaatgatacgatttgttcggatcactcatagaacctgctccaagaaaggcgccccgtaaaaaagctcgacgacagcacatctgctgtacgataaggggactgacaatatgaaactcttcgaatccacctctgtgttcctccaaaagctttgtagcctgcagaacacgcagtgcctcttcatgtcggactatcatcactgagtaggccgcactttgtttctctatattccttcggatagagatatcagcttctatattaaatgtttttcgaatcaatgtaaagacttttcttgcaacagccagattttctgtattgatttttaccccataccgattcagactgctgatcgtcactgacccgcacattccgatcaatgccgcaatttctgcaatctggcaatgccttgcactgttctgctgctgcgaaagttcttcttttactttccctgaaaatgacatcatatatactcctgctattttccttttctgatagcatctttttcaatatcccgatgttcaatacgcacaccataattctctcgcatctccagatattgatacaatgcattggccagcgtgacagaacgatgctttccccctgtacatccgaccgcaacaacaagctgattctttccttccaaaatataatttggtatcagaaaatccatcatttgacttaattgcccgaaaaattcctgcgccttgtcactcttcataacatagtctctgacctcggcatcattgcctgtttttgaacgcaattcttctatataataagggttcggaagaaaacgaacatcaaatacaaggtctgcatcctgcgggataccatacttgaatccaaaagacatcactgtaatatacagattcttaaaatctttcccctcaacaaagattttttccagttccacacgaagctcccttgtcaacattttgcttgtatccaaaataaaagtcgctcggatttttaaaaatgcaatttcctcccgttccttggcaataccgaggtcaatgtgccccgcacctcccagtggatgctgtcttcttgtctctttatatcgtttcagaagaacatcattgcctgcatccagaaacagaatttcataatgaattccactttcatccaattcttttaaatatccctcaagtcctcgaaatgcctgtcctcccctgatgtcaattccgactgctgcctgatttaatttagaatccggcatagcaatcatctctgcaaatttaggcaaaagcggcaccggaagattgtccacacaaaaataccccatatcttccagcatcttcagtgcagtagattttccagctcctgacatccctgtaacaatgacaaacctcataatttaaaattctcctattcgtttcacttctgtctccagacgtactccaaatttctgctcaactgtatcctgcacatgtttgatcaatgtcagaacatcctctgcagatgcatttccccgattaatcacaaaccccgaatgcttttctgaaacctgtgcatctccaactgaatatcctttcagtccactgtcctgaatgagcttacccgcaaaatatccttccggtctcttaaacgtgcttcctgcacttgcatactcaagtggctgctttgttgtcctgcgttccttcagatcatccatataagctttgatctcatctgaatttcctttttcgagtgtgatcactgcgctaagcactgtataatcattctcagctatcacactggttctgtaaccaagctttaattcttccagtgacaaggtcagaaactctccctccggggtcagtacctctgcactttccagtacgtgcttcatctctcctccataagctcccgcattcatcatcaccgctccccccagagttcccggtattcctgatgcaaattcaaagcctgtcagactgtttgcaagagcctctgctgctacttttgacaacaacgcgcctgcctgagcataaattttattccccttcgtatagatttcattcatctgcctgcatatctggatcacaactccccggtagcctttatcgcccaccagaagattacttccatttcctaatatataataagaaatctgctcttttttgcaaagaagcaaaatctctttgatctcttcttttgaatgcacagtcacaaaataatccgccggacctccgattcgaaatgtcgtatgccttttcatcggctcatccctcaatacattctcttcccctgatatctgacataattctttatacaccctgtactcatctccgtttcttttcttattttttcttccaacatcatacaacaaccttcctttaaagtaaagcgtacattcatagattcctctcagctgttctcttgcaaaatccgtaaaaatgatgtatattagtaaatacctgtatatcaatatagagaacatttttgaacaaaaggagtgaactacacaattggactcgagtgatactttccaatttataattcttgttattttattattattatctgcatttttttcatctgcggaaacagcactgatgacggtaaataaaattcggatgcgttccctggcagatgacggcaatcggcgtgcagctctggtgctggatacaactgaaaatcacacttccaaaatgctgagtgccattttaatcggtaataatattgtcaatatttccgcatcttccttatctgcaacactggcttattcattcggcggttatatggtcagtattgcaactgcgattctgacagttgcgatcctggtgttcggcgaaattactccgaagaattttgccaccatccacgcagagaaggtttctcttgcttatattccgattatacgcttttttatggtaattatgactcctctcatctttttgattgatgtgttttccaaaggatttatgtttttgcttcgtgtagatccaaatgcaaaaaataatgccatgacagaagacgaactccgtacaattgtagatgtcagccacgaagacggcgtcatcgaatcggaagaaaaggaaatgatctacaatgtattcgacctgggggatgccaaggccaaagaagttatggttcctcgtgttcacgttgcgtttgcggatgtcaacagtacttacagtgaattgatcgatatttttaaggaatacaaatttacaagacttcctgtatatgaagacactaccgacaatgtcattggtacaattaatatgaaagacttgctcttatttgaagataaagcaaattttcaggtacgaaatattttaagagaagcatactttacctatgaatacaagaacatctctgaacttttagtcgagatgcgtgatgccaagtttaatattgcgattgtattggacgaatacggtgaaactgccggcattattactttggaagatatcctggaagaaattgttggcgagattcgcgacgaatatgatgaagcggaggaagagatgatccaaaaagtcaacgatcaggaatatatcgtagaaggatctatgaatttggatgatctcaatgataatcttgggacaaaacttgaatctgaagattatgattccctcggtggatttatcattgaacatctggacagactaccagaagtgggagatcacatcacgaccgaagatcagattcgccttgtcgttgaaaagctggacaaaaaccgaatcgaaactgttcatgtatacttgccttcaaaagcagattccacagaagaggaagatgagcattgatttcatataaaaaacggctggttttgaatcatatttccaaaaccagccgtctttttcttccatttttaaattatttttatcccatatagaaaggaacgatatcatgaaaaatttatctgatttctgtcctgaatttcaggaagcagctgcttattatgccgacttaaatgcaccgggtgatcagaccatcctggtagaatttttacgggaaacacaggaactcttcggctgcattcccaatgacgccaaagaacagattgccagaatcatgcaggtgaagcctgctttgatcgacaccttgatccgcctttatccaagcctgtcaagtcagacttacaaagaagagattattttgtgtacaggcagtacatgctgcagcagacaatctgctgcacttttaaaaaaactcgagcaaaagctccaaatccatccgggggaagtaacctctgacgggatgtatctcctgcgcactcaaaaatgcttcaaacaatgtggacaaggccccaacatgaaaatcggcgaaaaaatgtaccaccatgtaactgccgaactcattgatcaattgttttaatctgattgttcaggtactgacaatcactgtgggatatcctgcccgtttcaaaagttgttccatttgtgctgcatcttccaacgtaacataattccccactctcacgcggtacagacggtctccttccacaatgcgtgcaggaaaatcctgttctaaaagttcttccaacaagttctgtgcataccgctcgttccggtatgcacccacttgaacttcatatccgggtgattcaatctcatgatccgtttccagcgtatccagaattccataagcgatcgcctgggcaatctcttcaaaattttcatcaaatagtttattatctacatctgaattgataaatccaacctccaccaacacagcaggcatttttgttctttttaaaacaaccaggttcggtctggccttgaccccaagatttacaaatccgatatcctccaactgttcattgatgttctctgccatctgaagcttgattccggatttatcatatacaagactttccactcctgagactgcattgtcagagggaaacgaatttctgtgaatagaaacaaaaaaatctactcccgcccgattcgcctccatcgctttctgataaggtgattcataaatatctgtcgtgcgagtatactcaacatccagtccgtgagcctctaaaatctctccaaccgcaagcgtcaaacgaagtgtatcgtcagcctctttccgtcctttgtataccgctcccggatcacgtcccccatgtccggcatctaacataatagaatatggcatgctctattgactcccttttgattcattctgtaatagaatatgcacattctgctaaaagggtgcaatcaataatgtctctctgacatactcaccattttttctaaaaaatgttcgatctctacagaaaacaaatccattacttcctgataaatctgtgcctttatcgcacaggtactggaactgcaccccaagtccttcgcctttttcctctcttcctgctgcatcctgaaatacagtgtcttaagcagattcgaattctgcgtatgctcacagtccaaatacaattccacaatgtcatgatcccctttcgtcaaagcaatttcaaatgcatgacgtatcgctctttccactcgggaagccgtcgtttcatgtaggcgggcaatctcaaaatataaagagcagatttttccgtcaggataataaggatccgtatcgaataattctatcgcatcacaaatatacgtgaatccttttatactggctggcactcccatctgaagaagtacatcgattgtcttgtctctcattttctaaccctctcatttctttttcgcaccaccacaatgtatttccatactacgccatatcacaccaaaagtcaacaagtttcttgtaatttcattggttgacttttctagaatcatgtaatatactggcattatgaaaatagaataaaggagggtatctgtatggaaatagggaaacagttacgtcgtcgtcgcacagaaatgaatctttctcgtggagaactcgctaacaagattcatgtaaccccatctgcaattgctaattatgagaatggtattagttaccccaaaccagatattctggtggcactcatgaatgctttggaagttgatgccaattatctatactgggattatctttcaactggaacaatccaacgactttatcgaaatgtcctaagcccggaagaaaaagaatccattctgaaataccgtgaactttctgaaagcggaaaaagcctcgttcgtttgatcattgatgaagaatataagcgcaagaaccaaagcgaatatattacacttccattttatcgtcccggtattcgcaaagtaaattctggttttctttttcaaaacaggaatcctgcacagacaatccgtgtcaacagaaaacagatttctcaaaactgtgatttttgctttgaagttctggttgaccgctaccagcctatttttcaaaagcatgacatcctcttactgcagcgtggaaatgtctcgcacaatgaaattggccttttctggttcaacggactctactacatccgtattctttcgcgggaaggcagcatctctcgtctccgcgccctcaacgtaatcgacccggatatcgtagtaaatgaacatgaacattttgaatgtatcggaaaggttctcggaaaggtttatggatcctacgaactctacggaaaagctccggatgattttcctcttgaagaacacgaattagaagttcaataaaaaagaaaggatccggtaccgttactgtaccagatcctttctttttcttactcttgaacaattccttgttctttcattacatttacaacctgagccacatactgcttacaaatttcatccgttgccgcctctaccataacacgaatcaaaggctctgttccactttctcttaccagaattcttccatcgcttccgagtgcttctgctgcctctttgatcgcattctgtacagactcattttctagtgctgcttttttatctgttacgcgaacattctgaagaagctgcggataaatctttacttctgaacacagttttccaagagactgttttttctccatgatgacttccataagcatcaaagatgtcaaaattccatctccggttcttgcatgtttgctgaaaatgatatgtccggactgctctccgccgagcacaaacccattgttcatcatattctcatatacatacttatcaccaactgctgtctgctcatatttcatgccgattttatcacaagccttataaagtcccagattagacatcactgttgtaacaatcgtatttcctgccagtttcccctgctccatcaggtattttccacatacatataagatcaggtctccatctacaacatttccctcttcatctactgcaatacagcgatctgcatctccatcataagcaaatccgacatccagatgattctcttttacaaatgcctgtaatctttcaatatgtgtagagccacaattggtattgatattgaccccatccggttcattactgattacatatgtctttgctcccagtgcatcatatacactttttgcaatgctggatgaacttccatttgcacaatccaatccgactttcatatctttaaaggaacgtgttgcaagagaaatcagatgtccgatatagcggtttcttcctgctgcataatcaacggttcttccaatgtgttccccaaccgcaagtggaagttcttccattttcccatcaatatatgcttctatctgctcttctacttctgcttcaatcttatgtccctgcccattaatcactttgattccattgtcatagaatggattatggctcgcagaaatcataattccacagtcaaaatcttctgttcttactacataggacacacttggtgttgttgtcacatgtaagaggtatgcatctgctcctgatgctgtaagtcctgatgccaatgcatattcaaacatataactgcttcgtctggtgtcttttccgattacaattctggcttttttttctctgccaaaataccaaccgagataacgacctactttgaaagcatgttctactgttaaaacaacgtttgcctctcctctgaatccatcagttccaaaatatttacccatatgtctccctcttattctttcttttgaccttttgtgtctttccttttcaacgcattgccgcgctgacgctcttattatattctttttatttttaaaatacaactattttcttttttctgtctgccttccataaaatcggttatttccagtaactctatacaaatttctatttttcctgtacaatagataacgtatgattcagcatattgctgtttcttatcaggcgatttccgcctgccaccggcatatattgcggaaatcccagagggtttaaacaatcaaattttctaaatattgggaggaaaccatgataaaattaattgcaagtgacctggatggaacgcttttacagaatggtgcccaggctcttactccgcgggcaatcgatctgatttctcagctgtgtgatgcaggtatccatttcgtatctgccagcgggagacagtatgacaaccaaaaacgggtatttgctccgttaaaagaccgcatttcttttattgcagaaaacggctctatctgcatgcaccaggaaaaagtcatctcccgcgcaaccattcacgaggatctggctgccagaattttaagagagatcaagaaacaggatcactttgagatcgtagtctccagagaagatacgtgttttattgaaaacaacgttcctgagtttgtcaatcacattgtcaatgtaatgcacaacactactcaaatcgtagacgatattacaaaagtagaaggacctatcttgaaaatcgccatctgcaatatgtctgacagcaatcacattgtcgataaatatctaaaacatttacaggatctgttcggctctgaaattaaagtcgttacatctggaaatatctggattgatttcattgctcccggaagcaataaaggaactgcacttcagaacctgatggatttatttcatgtaaaaccggaagaatgcgtagcttttggcgatcagtataatgatattgaaatgctgcagcttgtcggcaccagctatgccatgtccaatgctgctcctggaatttcctactattctacctatgtaacagattctgtcgaagacgtactggaagatattctcgcacaggttcgttgattccatctaaaaaggatgacatgctgcatgcagtgtcatcctttttaattatgcgtcatttatttttcttcgatttccatgatcatatccacacgtttctgatgacggccaccttcaaactctgtattcagccatacatctacgatcatctttgcaagttctgcgccgactactcttgctccaaatgcaagtacattacagtcattgtgtgctctggacatctttgctgtaaacggttcactgcaaactgcagcacgcacacctttgactttgttcgctgccaaagaaatccccagacctgtaccacagatcaggattccacaatctacctcttttgctgccacagcgcgtccgactgcttcaccatatttcggataatcgcagctctcagaagagtctgttccaaaatctacaacttcgtgtcccttttctttcaagaactcaatgatctctgcctttaactccaatgctgaatggtcatttccaattccaattctcataatgcttctcctcacataactttctttttccaatcatatctattgtccaatatccgctgacaattgtcaagcatccccctgtactttctgcaatacacaaaacaggtacagaaaattttcttaaactctctgtacctgtttttcatttttctgatctgctatttatatttgttgttgtagataaacaacaatgtcagcaatcctaccagacctaccagttccataatcagtcccggaacgccgatatttttctgtcctatgatgatcaaggcaaggcagacaacaaacacaacggccatgatcaaaactcgaatcttttcctgcatttttgtctcctcctatcctttcaaaccacccagtgtcattccctctgtcaatctcttctgtacacagatatacaagatcaataccgggatcataacaattacaagacctgcatacatgataccgtagtttgttgctgttttttcaactgccatcagattcttcaatcccattgccagtgttccatgctcatccatcaatgtatatgcgataatgtattcattccagaatgtcaggaagttaaacatgataaccgtcagaatacttggttttgccatcggaatcatgatcttcaccattgttttaaagtatccgcatccatccatatacgctgcttcttcaaatccctttggaagggtctggaaatatccactgagaagatagattgtaaatggcagattacaagatgcatagatcaatgccagaatcaaacggttatccaggaagaaatcaatatgtaacgccttattccaggaactcagcatcaggaaaatcggcactacaatgtaattgacattgataaaaagtcctgccataaatgctccattgaaaaactttttccctctgaacttaaatcttgccaacacataagatgctggaagtgccagtatcaaaagaaacgccagcgccaacaccgttacaatgatcgaattcaggaaaaagtctcccatctttgcatcccgaaaggctacaataaagttctgataataaaactgttttggaagagcccacggattaatatctgcaccgatgaattccgcattctttttcagactcgccataaatacccatgcaaccggtacaatgatcgaaattgccagagcgatcagagctacatagataaaaattttatacaatacacctgtagaaattttgtgttttttctcttgcatgtctctacttcgctcctttctaaaattctaagacttctctgtctgtaatcttgtttacaactgctgccagtatgaacgagaagaggaatactacaactccgattgccataccatatccatatacacctgctccatatgcctgtttgtacatatagttcaggaacacttctgtctttccattcggaccaccgtctgtcatgatctgaacaaacaggaaacttaagttgatcgtactgatgatgtagaatgtcaatgttgtacggatattactccagatcaacggtaatgtcaccttgaaaaagatctggatctctgttgcaccgtccaaagatgccgcctcatacagatcttctgggattgccgccatactggacatatacattaccatgtagtatccgattgcctgccataccagtgcaaagatgacggaatagataacaatgcccggatctcccatccactgacgcttcaatccgctcagatgaatcgcatctaaaaatgtattcagcaatccagtgcttggattgtaaattgcaccaaaaataccagcgataacaacaatactcaaaatatttggtatgtaaaaaatgatcctgaagaaattctttcctttaaaatttcctcttgacagcaatgccgcaaataaaactgcaaaaacaatcgtaaaaatcataaccattacaatgatcaagatcgagttctgcatcgcttccaaaaagttcttgtcgtccatcagtttgataaaattgctgaatcctacaaaactcttcttatttgtaattccacccatgcggtacaaggacatacggaaaacattgatcgtcggaataaatataaagatcgttgccagaattacagcaggcgccagacatacaaaaacaaatcttctctgcgctttctccctgttcatagatttcctcctccatactgctgtcttttaaaaacggtgagttatcataactcaccgtttcatgtcagccgaatatcactcacttatttttctaatgcttcagcacatttttcccaagtctctactaactgtttctgccattcttcaactgtcatatctcctgtgttgatagactcgattggtccgtaaacagcttttgccatatccagtccttcgattggagctgttgttgcccatttacctgtaacagctacaacgtcatctgctgttgctgcagcataacagtcttttgtaacaccttctggaagtttgtcagcagcgccttttacaggaactacaactggtgtagcagattcttttccggactctttgtctgttgtcttattattcagacagatatctactacttcatcagaatacataaattttacaaattcttttgcaagatccatgttcggtgcatcagccggtacccacatctgctctgtgaatgtgtatacagactgtgactcatcttcgctccatttcggaacacccatcataccccattcgtaatcttccggagtagaaggtgccatctcagcgattacccagttaccatttggcataaataatgcttttccgtcgataacgttctgctgattgatcttgaatccaccgtcagcatttgcattggaaactgtatcttcctgtgtataatcttttcctacaagttttgcaactgtatccagaactttctttccttcgtcagatgtccatgtatttgcatcatattttaatgcatcgttatagaagtcaagtccgcctgcctgtgcaagcattgcataaattgtagcatcaaagtatcctgtagtcgggaatgtaaagagagaatgtccatctttcttagcctgctcgccaagtgcgaagaactcatcccatgttgtaggaatctcatactgttttccttctcctactaatgtagcattataccagaatcctgtaggtgtatagaaaatcggtgccagataaacttttccatctccgtatggctgtgcatctgtaccatccagaataccatccaacagctttcctttgagttcatcatcaaatacatcagaaatatcagcaattgcttcttctttgagcattgtctctgtgaatccgcttggctgtcccagattgtaatatacaacatctggtacgtctccattctggattgcttttgtcagatctttgtccagttccggcgacatctcaagctctacttttacgccctcgtgagattcctcaaatgcttttgcaatgtcttcccagatctgagttccgttaccaccttcgaatgctgcaactttcaggactttctcttctgaacctttgtcagcatcttttcctgaatccttgcctgaatcatcacttgatccgcatccggccagcatagaagctgtcattgcagaaacaagtgcaagtgccatcagttttctaacagttttctttttcatattgtttcctccctgtcgatttgatatctttatgatagcctatttgtctctgcttttctattcggaagttggcttggattttatatatattgctatttcgccttgttttttttgacaaaaacttttttctttgtgaatcaagtcggtttctgtatctattttcctgtttttttatcacttttatacaactttatttttctcttttaacgatttcctactaaaaagatgtttattttagacaaaatctgtcattcttcgattcctgtcaaaaggcggatagagtctttttcagattgttgcacataatttctccaccttttctacatttggcccggctgctttcacagaaagcattgcctgtactgcattctgcaccggattgttgatactggaaagcaagtataaaatactcagcattgcatttgcctgcatgtttccttttgtagccatccaggcgcagaataaaatctgaaaaaacaatgttccatatgtcaatgaaagagcagacacttcagcactgctttcacagaatcgagagtgataacgagattcttccacatccttcacacaacttccaaatatcgcttctgtttccttttcaatctggaagctcttgatcacttcaaatccgccgaagaaatcttttattttccctgtatatcgctccagactccgataaaatcttccctctgcctctgaaatcctatgccctaataaaaacgggactgcaaccggtatccagacggtcacaagaaccatacctgccaccctgccatcgtaacagcaaagtactgccagacaaccaagaaaaacaaaactctgctgaataatctccggaatcttcgcaaaataattgttctccagattcgttacgtcattattcagtattgagagatacgtcccactgttgttactcgtaaactggatcatatcctgatccaacactgcatcgaacacatccctcttcagctgtatattgatccgcttcagaaatgtcctccgaaagtaagcgcaggcattctgactgactgcataataaaaaacagtaaacaaaagaatccctgccagtctcaaaatcgctgcctttgtcatatctcccggcaattctccaattttctgaaacacaaatgcccacatcgtttcccccattcccgccagaatggaacataagatcacacctgccagatgtcccttatttctttgaaaataaacatgaatcgaacctgttttctggatcatatctttcctcccctgctaatgattcacggtatagaggctatagaaaaattgctttttcttcatcaactcttcaaatgtccccatctccacaatatttccctgatgcatcgtcaaaatgcagtcatactgctttaaaatcgactcataaaatcgatgagtcacattcaatatggtggtctctttttggcttaagatcaactcttcgatctgcatggaaagttctgcatccagactggacgttgcctcatccagcaataacacttctgccctggttaaaattgcccttgcgatcgcgatccgctgtttttccccaccggaaaagttattgccattttcgcaaaccatctgctctatccccaatggattgtcttctacgattttctcaagccccgccttttttactgcggctttgatctcctcatccggatactcctgaaacatcgtaatgtttgcccgcaatgtatcttcaaacagaaacacattctggtggatcatagccatttttcgactcaaactttttctgtctatcgtccgaagctcctgtttccctatgagaatttccccctcgtagtctttataatagttcgccagtagcttcaacaacgttgattttccgcatccactgcttcccacaatggcatacttttttcctttctcaaagcacacattcaccccatgtaagacctctttttctttcgtgtagccaaaccgtacctctttcaattccaacggcatgactgattttaccggttcccctgtttttttcgattcttctggtctttcatttaaaagagtctccacctttctggcatttggaattgctgccttcacatccaaaagcagatatgcaatctcccggatgggattattgacactgaagatcaaataaaaaatactcagcagcatccgctctgaaatacttccggtaaataccagatacgctgagacaactagctgtatactcaagatcagatacgtcagcaataacgttaaaattccatatggattctgatatcgtctcccttcataacgccgcttctccacttcttccgcacttttcgcaaaccggtttttcacttcgtcctcaacatgaaaactatgaatcacttcaaaaccccccagccagtctttcagcttccgattgtaattctcaagttcttcatataatgctttggtcttctgtgataatttctctccgattaaaaatggaaccgctacagggagtaatgccgtcaaaatcaccagacacacgatcctgacgtcataatagcagagtacacctgcacaagtcagaaatacaaatccattttgtaaaatctccggaatcttcgcaaaatagttgttctccagattcactacatcattatttaacacagacagatataccgcgctgtttttctccgtaaactttgcctcaccttttctcatcagcacatgaaatacatcctgtttcaattgtgtattgatctgctttaacaaccttctctgaaaatagaacatcagctgttgactgaccacaaaatacagcagacacaatcctgcagacagacataattgctgtatggaggtgtctaccgttcctcctgcaaatccactggcctgttcgaataaaaatgaccagagcatgtaagatgttccactcatgattgaaaaaataacaaaacccgtaagaatccctttgttttttccgaaataaccatgtacgaaaattcgcttttgcatattacatttctcctttcacaattctcattatcaaagaagacgtaaaaaaatcccatgacgtaaccgaaaaacatctttcccgatttcgtcatggaattctttcttctaatatgttactgtattttttcatccaacggccagttcttttccatataagtctgcagggaatgctgcaattccagatcaccgaacattttgcttaaagcatatgcctgttcaaattgctcttttctcacatcctgcccagactctttcatggcatagatcctgtttgcaaacagcatattcaacggtccctgtccttttttcaaaaccattcggattccctgatctgccagtgcaattccttcttttaccttccccacttctggaagcgtattggccagattgctccagatcagcatcactttctgaaaatgatgttccatccgcacctcactgttaccataaacttgcaacagcaacttccagatttctactgctttctctttttcaccacggatcttttctgcaagagcaatctgctgtaacaggactgcctcctgatcggtaaatccctgtctcattccaattcgatgtgcttccatccgttcttcaaatgctaacgtataggataacgttttcttgtgctgtctgatccattctccttccaagatcttgccctgctgatattccagacatgtgcgatagccctccacatactgcctgttgatcttcttgctcagatccaacttctcttccagcttcttttgacattcttcccaggtttctaaatccaggttagaaaccgccattctcaacttctgtgtcaattccaacaccgaaaaatcatttgtccatacttgtccgatgaaatagcccggcttgatttctaatctattctccaaagcttccagatttttcaaacttggacttcttttcccggtctcaatcctggaatatgtctccggtgtacaaatcccctcgctagcttcttcctgtgaaaatcctttctccactctggcagaaagtaaaatctctggaattaaaaatagattttccggaatctcaatcccccactccatccatgtcgtttctatttctgtttcctgatataccgccttcagcgcatttttccacacttgataacaatctgcatctttccccaaacatctggaatctttttccaaatcttccaatatgctcactgcatactcaaaactttgattttgcacactgttttccagagcctctttacataaaagatagcgtttttcagaaaactgatttccctttacttcctgacaatagatagaaacagctcttggaaagatctgattttttgcctgaatatctgttatatgctcctgaatgtattgaagaagtactcccaacaattctcttccctgttccgcttccttttgcatcttacactttgcgtaaaaaagcaacaaatttaattcctggatactaaacaaatcctcttcttcgatttttccagaaaactcaggatgagtcagccgaattgcttcctccaaatcagaaatatctgcactcgttcccattagaatcccctgaatatagcgataaaactgctcctgtaatacagaatgaacacacccatctaaagattcctttttctgcagcagctcctgtgccaaggaaatttttttctttctcagcgcctctttcacctttctcctccactcaaaataagcatactcctgacaggaaatcatcgttgtcaattcatccgatgattttcccaatctctgaatcaatgcattcataagcagacgatctggtattctctctccattttcatagcgcgaaagagctgaaaccacacataagcctctgcacaatcgttcctggctgattccctgcttttcccgctcttttgtaagaaataatgaaaatatcgtctccatgctatctcaatcccattcccttttccaaatccaacagataccgcttcacttccaccccacaggcaaatcctgtgatatctccgtttttatgaatcacacgatgacatgggattatgatcataatcggattcttattgtttgcctgtccaacagcacgtactgctttctcattgccgataccaatcgcaatctcctggtaacttctcgtctccccgtacggaatcttctgcaactgtctccaaacactctgttgaaacggcgttccttcatattttaacgccacatcaaattgccgcctcctgcccgcaaaatattcgttcacctgtgtataaacttcatataaaaaatcagaatgtcgttcattcttcattattttctcagaagcagctcgccaaaaaagattcgtcagcttctgttcctcttcgcgtatggtgagaaaaccgattggagtgtgaaatgtatatgaatccatgtattcttctcctcctgcttgccatcacattttcaaaaaagcacaacaaccaatttcatctacttttttcagccctaatgactgatgtacatcacccacaactctgaccataccaatcaattgctctccatcaaaagcagcaatctttaaaaatgaattctcatatgcctgctccaacatttgaggacttcttgtataattctcccatcctacactggtgtaaagtgacaaaatttctttctgattaaaattcgtgtattctcgtaattccatgtaaatttctcctataggattaaatgaataatcgtatctcatctgctctgcctgtccccttctaaggtcaggtccctttttgatgtatattatcaaaacaaaatctattcgtgcaaattttatattagacttgaaactccgttaattcaatttttaatttcatcatgaaaaaacccgcagaaccgaagtcctgcgggcaatatactttattcaaggtagttctttcacgattactcgatgattgtagcaacctttccagatcctactgtacgtccaccttcacggatagcgaatccaagaccctcttccatagctactgggtgaatcagttcaactgtcattgttacgtgatctccaggcatgcacatttctgttccttctggaagctcgcaaacacctgttacgtcagttgttctgaagtagaactgtggtctgtagttgttgaagaatggtgtatgacgtccaccttcatcttttgtcagaacgtaaacctgagctgtgaattttttgtggcatgttacgctgcctggtttgatgagaacctgtcctctttcgatttctgttctctgaacaccacgaagcagagctccgatgttgtctccagcctgtgcttcgtcaagaagtttacggaacatttcgattcctgtaacaactgttttcttaacgtcttcgtggataccaacgatttcaacttcgtcagatacgtgaagaacaccacgctcaactctacctgtagcaactgtaccacgtcctgtgatagagaatacgtcctctactggcatcaggaatggtttgtctgtatcacgctgtgggtctggaatccatgcatctactgcatccataagttccatgatcttgtctccccactctccgtttggatcttccagagctttcagagcagatccctggataactggagtgtcatctcctgggaattcgtactcgttcaggagttcacggatttccatttctactaattcaagaagttcttcatcgtctaccatgtcacatttgttcatgaatactacgatgtaaggtacacctacctgacgagacagaaggatgtgctcttttgtctgagccataactccgtcagtagcagctacaacaaggatagctccgtccatctgagcagcacctgtgatcatgttctttacatagtcagcatgtcctgggcagtcaacgtgtgcatagtgacgtttctctgtttcgtactcaacgtgagctgtagagattgtgattccacgctctctctcttctggagctttgtcgatgttttcgaaatcaactgctgcgtttccgtctactcttacagaaagagtttttgtgatagcagctgttaatgttgttttaccatggtcaacgtgaccgatagtaccaatattagcatgtggtttgtttctttcaaatttagctttagccattttgaatatcctccttaaatctgtcgcctgaaacggcaatattattggtttcgcttttaactcggctaattttgattatatttcaaaatcagccgaatagcaagcatttttgcgatttttacgcatttttattggataatactttttcctgtacagacttcggtacctgctcatagctgtcgaagaacatagagtagttaccacgtccctgtgttctggaacgaaggtctgtagaatatccaaacatttcggacaatggaacgaatgcacgaacgatcttaccaccgccaaggtcatccataccttcgatacgtccacgacgggagttgatatctccaatgatatctcccatatattcctcaggcattgttacttctaccttcatgattggctcaagaagtacaggagcagcctgtttcatagcatccttgaatgccagagatccggcaatgtggaatgccatttcattggaatcgacttcatggtaagaaccatcgtatacattagcatgtacaccaacaaccgggaatcctccaaggataccagatttcattgcatcttcgataccttcgccaactgccgggatatattccttcggaattgctccaccaacaactgtagattcgaatttgtatacttcttcaccattaacatccattggctcgaattttactttacagtgtccgtactgtccacgtccaccagactgttttgcatatttgctgtcaatatccactgcttttgtgatggattctttgtaagcaacctgtggagcacctacgttagcttctactttgaattcacgaagaagtctgtctacgatgatctcaaggtgaagctcacccataccagcaatgattgtctgaccagtttcctgatctgtatgcgcacggaatgttggatcttcttctgcaagttttgcaagagattcaccaagtttaccctgagaagcttttgtcttaggctcgatagcgagctcgataaccggctctgggaattccatggactctaagataaccggatgctgttcgtcacagattgtatctccagttgtagagtacttaaatccgattgctgctgcgatatctcctgaataaactttatcaagttcttcacgcttgttggcatgcatctgaaggatacgtccaacacgctcttttttctcttttgttgcattcaggacataagaaccagagttcatagttcctgagtacactctgaagtatgccagttttccaacaaatgggtctgtcataatcttaaatacgagagcagagaatggttcgtcatctgaagaatgtctctctacttcgtttccatcttcatccacacctgtgatagccgggatgtccaatggagatggcataaattcgattactgcatccagaagtttctgaacacctttgtttctgtaagctgtaccacagcaaaccggaattgcttcacatgtacatgttgcttttctcagtgctgctttcagttcgtctacagaaggctcttctccttccagatacatcatcatcagatcgtcatctaattcacagatcttttcaaccagctctgtacgatacagttctgcatcttcctgcatctcttccgggatatcaatgatagaaatatcatcacctttatcatcgttatagatgtatgctttcatttcgaaaagatcaatgattcctttgaattcatcttcttttccgattggaagctgaatgcagattgcatttttaccaagtcttgtcttgatctgttctactgttccgtagaagtttgcacctaagatgtccatcttgttgatgaatgccattcttggtacgttgtaagtgtctgcctgacgccatacgttttcagactgtggctcaacaccaccctttgcacagaaaacgccgacagcgccgtccagtacacgaagggaacgctcaacttctactgtaaagtcaacgtgtccaggagtatcaatgatgttgatacggtgctctaaagcgccctcttttggtttgcagttttcctgcagagtccagtgacaagttgtagccgcagaagtaattgtaatacctctttcctgttcctgctccatccagtccatggtagcattaccttcatgagtattaccaatcttatgattaacaccggtataataaagaatacgctctgttgttgtagttttacctgcatcaatatgagccataataccgatatttctggttctctctaatggatattctcttccagccaaggttttttcctcctaatatattgtagttccccgaaacaaaaagtcccggagaacatgcctcttgcttaagccgccaatctgcggctgccgctttggctcttagaaacggtagtgagcaaacgctttgtttgcttctgccattttgtgcatatcttcttttttctttacagatgctcctgtgttgtttgcagcatccagaatttcgtttgctaatctttcttccattgtcttctcgcctctctgacgggagtacaatgtgatccaacgaagtgcaagagcctgtcttctgtcagctctgacttcgatcggcacctgataagtagctccaccgatacgtcttgcttttacttcgagtactggcataatgttgttcatagcctcttcgaatacttcgattgccggtttttcagcttttgcttcaactctttcaaatgctccgtatacaatcttctgtgctacacctttcttaccatctaacatgatgttgttgataagtttggtaacaactttattgttgtatattggatccgctaatacgtctcttttctgagtatgtcctttacgtggcacggtccttccctccttaatcataatttccggattcttaccgggattaattcatcggtactcacatgtgtctttctatggaatcacaattcatgtgtcgcggccgcgggacgattgtatctaaatccgcagccctaacttattgaacgtgtcgcccaataaggtacgataatcatagttctgtttgtgatacgatttaactatttagttacttctttgctaagcgctctgtttcttattttgcgtcttttggtctcttagcgccgtatttagaacgagcctgtcttctcttagcaacacctgctgtatcaagtgtacctctgacgatgtggtatcttgtacctggcaggtccttaactcttcctccacggatcagaacaacgctatgctcctgaaggttgtgtccttctcctgggatgtagcttgttacttcgattccgttagaaagacgaactctggcgatttttctcagagctgagttaggcttcttaggtgtagctgtcttaactgctgtacaaacacctctcttctgtggtgcagatacatcagttgcacgcttctgaagggagttccatcctttctgaagtgccggtgctgtagatttcttttcagaagtctgacgtccttttctaactaactggttaaatgttggcattctttttcacctcctatgatttcactcgttgtcttccggcttatgccggaagggctgcagataatggttcattatctgatatttgtgcacaaaaacagaatatctcctgtgcacgctaaattagtgtattacgttttttcccgaaagtcaagggattttctaagattttctgcaactattctttttttgttactcttcacgccaatcctgcctatccaagcaaccagcaccacatcggaagtgtgaacaatgacaagatggttgtaacaaaaatcattccggtcgcatacccttcatttccatgatattttgcagacaaaagcgctgtcgtcaccggtgccggcattcctgcaataatcaccgtaattccgcgaagcagatccgggatcggaagtgccgcagtgatcccaaacaacactgcagggatcagaagcagcctgactgccgtgtacaacaccatggtccgatccagaattccttttggattcatctctgcaagcatcatcccgaccagcatcatactaagcggagtattacaactgctgatcccggaaattgtattttccatactcaccggaaaatcaatccctgcgatcatcacgatcaaccccaaatagattgcaacaatgcatggatgtgtcagcacttttttgaacaggttttctcttttttctttcataaaacaagacgttcccacgctccacatcacaattcttactgggagcatgaacactgaagcatagaacaacccgttcgcaccatagattccttcaattaccggatttccaagaaaacctccgttggaaacaatcgttccgtaccggagaggttttcgtctttccgtttctgtcgttctgtaaaaaatatggctcattattatagaaagaatacaatatcctgctgaaaggagcagaacttctgcaaagcttttgagcatctcccactcccactccatctggaaagagtgaaagatgttaaaaggcagtgtaacatacaggcagaaattgaccatttctttgcgccctgtctctccgatgatcgtcttttttctcaccaaaaatcccactgcaaccaatagaaacatcatcagctgcatgttcaccatattctgaaatgccatttttagtatgctttaccccaatataccatgtgcttcgccggtttgccgcagcatacgcacacatctgaaatctgctcctgttcctctggaatacatctggatgtcacaccacctgtctgtgctttgatctcctcttcacaggcatcatctccacaccacattgctttgataaacccggtttcttcctgcgctactttcaccatctcatccatatttgctgctgtatgaatgtgagaatccagaaatgcttttgctctttcatacatatctttttgaatcgtctccaggatttcagacagtttctctgtcagttcctccattgcaactacaattttttctcttgtgtcacgacgtacaactaccacctgaccattctcaatatcttttggtccaatctcgatacgcgtcggaattccaaccatctcttgttcactgaatttccagcccgggctcttttcagaatcatcaatggaaactctatatcctgctgccttcaatgctgccaacagttcatttgctttgtcaagtaccccttctttgtgctgtgcgatcgggatcactcttgtctgaaccggtgcaatgtgcggcggaagtacgagaccactatcgtctccatgcaccatgataattgctccaatgatacgtgtagacagtccccaggatgtctcatacacactgtgcagcttattctctttgtctgagtagctgattccatatgcatccgcaaatgcatttccaaagaaatgactggttccggactgcagtgcttttccatcatgcatcaacgcttcaatcgtatacgtatcttgtgctcctgcaaatttctcacttggagtctttcttcctgtcacaagcggaattgccagatcatcttccacaaaacttttgtatacatcacgcatcatcagtgttctctcttctgcttcttcatatgttgcatggatcgtatgtccttcctgccataaaaactctctggagcgaaggaacggtcttgttgtcttttcccatctcagtacagaacaccactgattccatactttcggaaggtctctgtaagactgtactgttttactccacaaatcgcagaacaatgtttcagatgtcggacggatacagaatctttcctgcaattcttccattccaccgtgtgtcacccatgccacttccggagcaaagccttcgatatgatctttttctttctgaagaaggttctctggaatcaataccggaagatatacattttctactcctgtttctttaaaacgtttatccagatttgcctgaatgttctcccagattgcatacccgtttggaagataattcagacacccttttactcctgaataatcacacaattttgcttcgcgtaccacatctgtgtaccactgcgcaaagtctgcctctctggctgtaatagattctaccagttttttttcttttgccataatgttctccttttcttttttatttcttcctgggaagtgccccgctcgatttgttttcataaaaaaagccgagccttccttcccgataagggaccgaaagtctcggcggtaccaccctgattaaccacactgcctgtgattctctcttacaccgttaacgccggttctacgccgcattttcatacgaaagctcccaggccggttctatatcctttccgcagaagtctctcaccaaaatacttcctctctgtgccgttctgtaatatatactaatcctgttcttcgcttgtcaactatattcatcgtgaattctaactgaattttctgcgattgtcaagcgatcagcgtatctgcagcaatttctgttttaattcatgttccaggcgctgcatctctgcttctgcctcctgccgtttctgtctgccttcctgctggatctgcatcacttcatctaatgtggaaatcagagattcattggttgcttttaatgtctccatatccacaattccacgctcagactctcttgcagtttccagagttgccatcttcaatgtctccgcattcttcttcagaagcgcattggtcatgtccgtcacttccctctgtgcagcggctgcctgtgcagaatgctccacgccaagagcaagtaccatctggctcttccacagtggaatggtgtttacgatcgtagactggatcttttctaccattaccgtatcattattctgtaccatacggatctgcggtgctgtctgaatcgaaatcatacgggtcaattccagatcatggattttcttttcaaatcttccacacattgcttccagatctcttgctgcctgtgcatcctctgcaagcccgctgtttttagctcgcatcacacgttcattcagctctccctccctcacttctttgagcttcttctttccggccagaatatacattgtcagctctttgaaataggtcagattcaactcatacatcttgtccaggattgctacatctttcaacaactgtacctgatgtccttccaacacctgacagatttgattcacatttgcttctgccttggcgtattttgttttcagtgcctgaatcttgtttgcctgctttttaaaaatcccaaaaaatcctttatcctcttcttcatcaaaattcttcagctctattactacagttccaagaagctccccaacttctcccaaatcctttgtcttgacattctccaatgctgtctctgaaaaatcggccatcttactctgagtccctgcgccatactgcaaaatcatggccgaattcgtcagatcgatctgacttgcaaactgatctgccatctttctctcttcttccgacaaaacattttcattcatcagcggctcttcttttatgacttccggctgtgccgcttcctcctgaaatggattcagtgttaatgtcggtgctgtctgaagatcttttaattctttactcatcattttcctcctgttgaaaaatcatttttcataagtccttcctgcgccagcatcgtcttcagcacagaaatatccgaagatacatcccatgccgtgtcctgaaacagatcatccagaagcttttcaaatgctgtattcaatgtatccagtgtatcttcgatttcctttttcgaagacagaatattgtccccctgcaccggctgtgcatccagctcctcatatgcttccagaagcttgaccgctgttggaagataatattccatcagtctgcgaatatctgttaccgtctccggattttgttccactcgttcaaaaatacgttttgtcaaaagctccattctggatatcttttctgataccgcttcccccggaattgcatcattacattcccgaatcttgcagatatatgcatttcccgtctcaatcacttcctgtactttcggatccatggcagcccttcttcccgcatctgcatctgccttttccttttcagactgttcccataccttctgctgctttgcctgttccatcagttcctgatactgtccatatgcttctctgcttgtcatcaaacatactttttgttcatccagatatccttgcagaaaccagcctttttgaatcatatattccagatctttgactacaaatttttccttttttcgtattctttgtgccagttcttttacatttccatattcttttccatgcagttcgtcaatatacgtctgaaaccgctttactctgctaagaatccttgttcctgaagctccaagtatcgcaaataccgccagcaaaataacctggatactgaccgctatagaaacacctacacctgctcctaaaagcgctcctgccactcccgtaatcaatcctccgaccagaagacatcctgcaaacacatatccgataatcgccatcgccattcctgccgccttcttgccccgtgtcttcgcatacagcgttggccttttcagctggttcagatccagattctgccatccgctttttgcctgtccctgctgtcttccgggtccatcattcatctgctgatactgatagccgccgtgaggactgcgcatccctcctgtgaattggtgaatggcactgttcacggtatctgtaatcgtctgattcaaccttcgaaaatctctggagtctaccgcatcctgcacggtacgtctgatgtcttcaccaaactgttcccactcccaatttgtcctcatattttcaccctcctgctgtgagtcaatgccttaaagtgtccaacctgatttccagcagactactctatgtaaatcagtttagagaggtttgccggaaaagtcaagaatcccttgaccactcttttgttttatacgataattttgttattgttcacagtaacatcattgtaacagatttataaaaggagaaatacaaaatgaaaccacatattttatatgaagaccctcatatccttgtatgcctgaaaccagccggtgttcctacgcagacaaaccgccccggacttcctgatatggtcagtattttaaaaaaccacatctatcaaaacaatgtcacaaaaaaacagccctatctcgcagtcatccacagactggatcaaccggttgaaggcctgcttgtattcgccaaaacacctgccgccgccaaagaattaaaccgccagcttcaaacttctggttttggcaaatactatcaggctgttcttctgggatgtccggatgccccagacggcactttacacgattttctgatcaaagacggccgcactaacgcatcccgggtctgcccaaaagagacgccgggggctaagtctgcccgcctttcttatcacatcgtcaaaacaaaacgcgggctctctcttgcagaaattcatctggacaccggcagacatcaccagattcgggtacaaatggcaaatctcggatgtcccattgcaggtgaccggaaatatggcccgaaagagaccgcctttcctcagctgcagctttttgcatgccgactgaatttcacacatcctgacaccaaaaagctcatggaatttatacatacacctgttttgcatgtttttgacggcgaaacaccagctgatcaccctgcctgatcatagtattcccattgggaatcaaagttctgtctccccttttgatcataacgataagcactcccgatttttgatccagttcgctcacctgcttatctctccatttgtgatttttgtctatttctacttcacacaatgtcagattttcccggtcttcaaaggccggggctgcacagatcaaaaggtctcctccttctaaacaggtatttccattcggcatcatcatctcctgccctctgaacaaaagcacaacgagaactccgggcggcatttcaatatcctttaatgtctttcccgcgaaaggatgttgatctgtcaccttaatcttcacaaacgaaatatcattttcatcctgataatcattaaatgtccgcataacatttgcattgttgtcaatcatttccagtcttctggaaacaaccggaagaaacgtcccctgcactgcaagggaaatcagtaccattacaaataccatgttaaaaagattgtaagtcattggaattccggacagaacaacataaatagaaaacacgatagatgccactccccgcagccctgcccaggaaaccacgccaatctgctgccaggatgctccaaacggcttcaatatcgcaaacacagataccggtcgtcctacaaacaacaaaaacagacacaacaccaatcccggaaaaaatacagatggaagttccgacggagtcaccaacagacctagcagaaagaaaatcaccatctgtgcgatttctgttaaaatgtcaaaaaaatgaaccatatcttttttatccggaatatatcggtttccaatcaaaattccacataaataaacactcagatatccattgcctcctgccacagaaggaagcgcatagcctacgatcactgccgcaaataaaaagatcgtccttccctgtttcattccaaagtcgatgcgattcaataaaaatactgccgtctttccaatcaagaccccgcatactacgcctatcaaaatttgcctgatcaggagtcctcccacggaaatctgttttccagaaatcaaagaaatcatcacaattgtcagcatgtaagaaatcggatcattcgaaccggattccaattccaaaagtgagtctgtatgatacttcagagacagttgttttgaacgaagtacattaaacacagaagctgcgtctgtagatgcaataaccgatccgatcaaaagtccttccatccatcccacacccagcagaatatgagccgcacctcctaccagggctgccgtcagcacaactccggctgtggaaagcaaaaaagactttatcataacgggctttgcagttttaaggtttgttccgaatccaccatagaacatcacgaacaacaaactgacagagcatatcatttcagagagttcataatcatcgaatggaatcttaaaaaaaccatcgacaccaaaacaaatccccaggccaataaacagcaaaagcgaaggcaggggcagcttcgcagcaatccgattcatcaaaatgcaggccacgatcaccactcctgccaataatagaaattgattcatcctgctcctccttccagttattttatattttcccattttaacaggatttttgttctttcgcaatttctgctttttatatttcatgaagggcaaaaaacagtggctgtccgcaaatttccatctgcaagacagccactgctgttgttttgtgttacatttctcctgattcttccgaatctgcttccagagattcctgatatctctccagaatcgtattctggatcttttctcttgttccggaattgattggatgtgcgatatcacgatattccccatccagagctttcttgctcggcatcgcgataaacaatcctttttctccttcaatcactttgatatcatgaactacgaattcattatcaatcgtgattgaaacaaccgctttcaactttccctcttttgtcaccttgcgcacacgaacatctgtaatctgcatactgttcaagtctcctttctccgtctgcattactgtcccaattccttataatgcatacctctcgtttttttcaactaccacttttacaccattctcaccaacatgccgtgtgttagctctgatggtatctctgctttctacaatacaattttcaatatatgtattatctccgagatatacatcattcaaaataatcgaatttttgatcacacagttattgccgacaaatacttttttgaagataatggagttttccacggttccattgatgatacttccacttcctacaaggctgttctttactactgctcccggattgtattttgcaggcggcagatcgctcacctttgaatacacattcggagcatccttgaagaagtattttctcacttccggcttcaggaaatccatatttgtctggtaatatgcatccactgttgagatgttgctccagtagctgtttatcttataaccgtaaattttcttcagattcttatagcgaatcagaatatcggttacaaaatcatgtctctcttcctctgcacaatgctcgatcaggtctatcagaagacgtcttctgatcacataaattcctgtagagattgtctgagattttgccaccatcggcttttcttcaaattcctcgattctggcagattcattcatgcgcaccgtaccaaagcgagtcgcatcttctccatctcccagatctttgcatacaacggtaatatccgctttctttgcgatatgatattcaagcactttattataatccagcttgtacacagcatctcctgaggtaatgatcacatacggctcatgacatcttttcaggaaatccagattctgataaattgcatctgctgttccacgataccagtctccattattcactgtaatcgtcggagtaaatacatacagacctccctgttttcttccgaaatcccaccattttgaggaattcaaatgttcatttaaagatctcgcattatactgtgtcagcactgcaaccttctgtatatgcgaatttgtcatgttgctgagtgcaaaatcaatcgctctgtaactgcttgccatcggcatcgccgcagctgcacgctttgctgtcagctccttcatttttctgctgcttccgcctgccaaaataattcctactgctctcatgaacgttcacctgcctttattaatgtctcgccgcctgcaagcactccatcgctgtaatcttccggcacggtataaccgctgattgcagtatttttgccaatctgtacatcggatggaattctggagttttctccgatcgtagccaatccgccactgtaaatattcggtttttctttgttcggaacctcgcttccgattccgatcacaacattgttgccaatctcagtgccttccgcaataatcgccttatcgatcacgcagttatcaccgatcacaacatcacgcatcagaatcgaatcccgtacgatactgccttttccgatcgtaactcctccgcctaatacggaattatgtacttctccatatatctcagagccattgctgataatgcaacgatccaccacggactgctcagaaatgtactgtggaggaatattggcactgttcgtataaatcttccagaattcttcatacagattaaactccggaataatatcgatcagttccatattggcctcccaataagaactcaacgttccgacatccttccaatatccgttgtattcataagcaaacattcttcttccgttttcgtgacaatatggaatgatatgttttccaaaatcacaattcggctgctcggataatttcagaagagcttctttcaataccggccagctgaatatataaattcccatggatgccagattactgcttggcttctctggtttctcttcaaattccttaatcttactttcctcatctgtgactacgattccaaatctgcttgcctcttccatcggtaccggcattgccgcaatcgtaacatctgcatgattggccttgtggaaatccagcatcacctcataatccattttatagatatgatcgccggaaagaatcagtacataatccgggttgtaagtctccatgtaatccagattctgataaattgcattcgccgttcctgtataccattcactgtttgtgcttttttcgtaaggcggaaggatggtcacgcctccaatattacgatccagatcccacggaatcccgattccaatatgtgtatttaaccgcagaggctgatactgcgtcaatacacctaccgtgtctactcctgaattaatacagttactcaatggaaaatcaatgatccgatatttccctccaaaagccactgccggttttgcaacctttgcagtgagaactcccaatcgactgccttgtccacctgcaagcagcatggcaatcatttccttcttaatcatgtagtcacctcatttctagttaattgctattattataccataattttctcatcagtacatgatttttacaaaaattttgcataatctttttcctttttgtttatttggtacaaaaagaacttcttttaattttccccatatatagtataatataaactgcaaagaatttttatgactaaatttaataatctttttactttggaaataaaatacacaggatctacaactattttcacaataaggaaaggtaatcatcatatgtataaaatcaattttaaacagcctattcatgttcattttatcggtatcggcggcatcagtatgagcggtcttgctgaaattcttttgaaagaaggatttcgcgtatccggctctgactcaaaagaatctccgctcaccgaacatctggaagcaaaaggagcacagattttttacggacagaaagcctctaatattattgacgggattgactgtgtcgtatatactgccgcgattcgcagagaaaatgccgagctgatggaagcggttgccaaaaaaatcccgatgctgacccgtgcagaactgctcggacagctgatggccaattacaaaacccccatcgcagtatccggaacacatggaaagacaaccacaacttccatgatttcccatatccttctggagggtgataccgatcctacaatttctgtaggcgggattcttcaggctatcggcggaaatattcgcgttggaaactccggtatttttgtaacagaagcctgcgaatatacaaacagtttccttcacttttttccaaagatcagcatcatcctgaatatcgaagcagatcacctggatttctttaaagatctggaagatatccggcactctttccatcagtttgcagaactgcttccatctgatggtactttgatcatcaacggagaaattgatcattatcaggacctctgcgaaggtttgaagtgcaatgtgatcacttatggaatgtcacctgaatttgactacagcgcacaaaatatcacatacgatgaaaaaggacgggttgcatttgacttcttccggaagggacagccggaaagacatattgttctttctgtaacaggagatcataatgtctccaacgcactttctgcaattgcaacagcggaactccttggactttctatggatacgatccagaaaggtcttctttccttttccggaacagatcgccgcttcgaatataaaggaacgattaacgatgtaacgattgtagatgattatgcacatcatccaaccgagatcaaagctactttaaaggcagcaaaacattacccgcatcgaaaactgtggtgtgtatttcagccacacacctatacacgaaccaaagcttttttccaggaattcgcagaagcactttcccatgcagatcacgtcattcttgcagacatttatgccgcaagagagaccgatactctgggggtatcctctgaagcactttcagataccattcgaagccttggaacagattcccattattttccatccttttcagaaatcgaagcatttctcaaaaagaactggaatgccggagatcttgttctcacaatgggtgccggagatgttgtaaaaatcggagaagaacttttaaagtaaaacttatccacattatccacattggttattcacaaaaaagcggagtttctcctaaaaaagtgcttttgcctgtccagataagatgctataatacctttgcgcacgaaagaactgcgtatcattccaaaaggcagggagaaaactatgaaaacattcacgttaaaaaatcaattccataccaatgccactctggtttcgaatgcatttatcgaccactatatggcacaggcaaacggcgaatttgtaaaagtatatctattccttttaagacatttggatgacgcagactccgttctgacagtttctgctgtcgcagactgtctgaataacacagaaaacgatattctgcgcgcattcaaatactgggaatccaaaggacttcttcagatgcagtgtgacgcagaagggcatgtctgtgaactggaattggttcagattccacagacacaggaaccgcctgttgcagctcagaagccttctgagtctgcatcttctgtcagatcttcttccaagatcacacatactttagcttcccacactgtaaagcctgcagccaataccgcacaggcacaaaaacagctaaagtcactgttatttattgctgaacagtatcttggcaaaactctgacaaaaacagatatggatgcgatcacttatttttatgaccatcttggtatgtcagcagatttaatcgaatacttgattgaatcctgcgtagaaaatggtcacaaaagcatccattatattcagaaggttgctttatcctgggctgacagcggaatcactacaaaagaacaggcaaagcagcagacccgcagttacaacaaaaattgttacacggtcctgaacgctttcggaatcaagaatcgtggacctgctgcctccgaactttcttacattcaaaaatggaccgatacttatggattcactttggacatcattgaagaggcttgcagcagaacgatttctgcaactcatcagccaagctttgaatatgcagatacgattctgaccagatggcataacagccatgtacaccacttaaaagatattactgtgctggatgaagcatatcaaaagcaaaaatctgcttctgcagctcctgttccaaaggcaaaaccagtttccagaaatctgaacaatttcgaacgccgttcctatgatatggattctctggaagagcaactattaaacagcaattagaaggagagcactatcgtgggactaaagaattcacaatatcaggcaattatgcgcgagtatgagcagaaacagctcagaaaccatgatatactgacacagcattatgaaaaggtctaccgcgaactgcctgaattcaaagcactggatgattctatttctatcctgtccgtccaatatggaaaacgcctgttaaacggcgacgaaaaagcggtttcttctttaaaagaagaacttgccattttacgtgcaagtaaacaggaacttttgcgttccagtggttttccggctgactatctggagccggtttatgattgcccggactgcaaagataccggctatatcggcaatcaaaaatgtcactgtttcaaaaaagcgatcatagatctgctttatgagcagtcaaacttaaaagagatactcaaaaaagaaaacttcagtacttttgctctggattattattccaacaacttcgttgatccaaagaccggacgttcttcccgacaggtgattgaagacgccttacgggtctgccaaaattttgtaacaacgtttggaacggatttccagaatctttttctttatggagacgttggtgttggcaaaacatttctttccaactgtattgcaaaggaactgatggatcaggaatattctgttttgtacttttctgcatccaaattcttttctgtacttgcaaagtacgcatttgataaacacgatgtagatgcacagaatatgtttgaattgatttacaattgtgatcttctgatcattgatgatctgggaacggaatatacaaacaactttattgcctcccagttcttcacatgtatcaacgaacggctgctcaacagacgttctacactcatatcaacaaacttgtctctggatactctggccgatctttatacggagcggtctttctccagaatcacaagcaattatattatgttgaaactaataggcgatgacatccgaatcaaaaagaaattaagaaacagggaggaaaattaatgttacgtcgagaagaaagaaacttagaaaacattccagtaggagcgcttggtctgatcccagtcagaggatgcgaagatcttggagataaggtcaatgattacctggtaaaatggcgcaaagaaagcggctgcgaacataaaggagacgtcgcttttaccggttacgacagagatacctttatcattgatgcagatgtgccgagatttggttccggagaggcaaaaggaatcattaaggagtctgttcgtggaaaagacctctatctgatggttgacgtatgtaattatagcctcacctattctctgacaggaaatacaaatcatatgtcaccagacgaccatttccaaaacttaaaacgtgtgattgctgcagtaggtggaaaagcacgccgcatcaatgtgatcatgcctttcctttacgaaagccgccagcacaaaagaacaagccgtgaatccttagactgtgcacttgcacttcaggaacttgtccgcatgggtgttgacaacatcattacatttgacgcacatgatccccgtgtatccaatgccattccactgagcggatttgaaactgtccctccgacttatcagtttgtcaaaggtcttctgcgccacgtaaaagacctccagatcgacagcgatcatatgatggcaatcagcccggatgaaggtggtaccaatcgtgcgatctaccttgctaacgttctgggacttgatatgggtatgttctacaaacgccgtgactatacacagattatcaatggccgcaatccgattgttgctcacgaatttttgggaagttccgtagaaggaaaagatgtgatcatcatcgacgatatgatttcctccggagattctatcattgaagtagcaacagagctaaaacgcagaaaagcaaaacgaatttttgcagctgctacatttggtcttttcacaaatggtctggacaagtttgatcaggcctatgaagacggcacgatctccggtatcctgacaaccaacctgatctatcagacaccggaactgttgtctaagccatactatatcaactgtgacatgagtaaatacatcgcactgatcgttgacaccctgaaccatgacggttccatcagcagtattttaagcccggatgaaagaatccagcacgtactgcagaaatataaaaacggcgaagaaatttaatttcttcttatgcaaagaatctccgaaagcagcgccaaatctgcttccggagattttttataaaacaaaaacagccaaccttccaaacgaaggttgactgtttcacagctattcttacagtaatccgccgattgccataaacaatggtgcaaataccaaagatacaactgtcatcagtttgatcaggatattgatcgatggtcctgacgtatctttaaacggatctcccacggtatctccgacaacggctgctttatgcgcctcgcttccttttccgccgtgatttccttcttcgatgtacttcttggcattatcccaggcaccacctgaatttgccataaaaatcgccatcagaacgcctgtaacaagggctcctgcctgaagacctccaagagcctctactcccagaacgattccgaccaggatcggtacgatcactgccattgctcccggaagaagcatttcatggagtgcagctgtcgtagaaatggatacacaagacttgtaatccggtttctctgttccctgcataattcccggtttttcacggaattggcgtctgacttcctcaatcatcttatatgctgccttggatacagactccattgtaaatgccgagaacaggaatgtcagcattcctccgataaacagtccgatgatcacacgataatccaaaacattgatgctttccagatgtaccgcctgagaatacgatgcaaacaatgccagtgctgtcaatgcagcagaaccgatcgcaaatccttttcccattgctgctgttgtatttcccacagaatccagtttatctgtaatctcacgtacggattgatccagaccggacatttccgcaattccacccgcattgtctgcaatcggaccatatgcgtctactgctactgtaattccggttgttgaaagcattccaacggctgccagagcaattccatacagaccgtttacctgatatgccacaaaaataccaacacagatcaaaagcaacgggattgcagtagactgcattccgactgcgattccgctgatgatcgttgtagccggacctgtctcagactgttcaccaatcttcttcaccggattgtaatctgccgatgtatagtattctgtgatcagaccaatcaacacacctacaacaagacctgcgatcacggcgattgctccattaaagtttccaaataataccttactcagtacaagggatacgatcacaacaagaatcgctgccatattgcttcccatcttcaaggctttctgagggcttgacttctcatccccttttacaaaaaatgtaccgatgatagatgccagcagtccacatcctgcgattgcaagcgggaataccacgccggaaattgcagaaaccgcaacgccaagtgtcagtgcggaaacaagagatcctacataagattcaaacaaatctgctcccatgcctgcaacatcaccgacattgtcacctacattgtcggcaataacagcagggttacgcggatcatcctccgggattcctgcttctacttttccaaccaggtcagcacctacatccgctgcttttgtataaataccaccgcctacacgtgcaaacaatgcaatggaagatgcccccagactgaatcctgagagtacatccacattctttgtcagaatgtataccacactgactcccaatgctccaagaccggcaacacacattcccatcacagctccgccggaaaatgcaatggaaagtgcctgattcattccactttcttttgctgcattggctgttcttacattagccttggtcgcaacgttcattccgaaataccctgccagtgtagaaaacaatgctcctacaacaaagcagactgccgttacccagttgccaatcccaaatccgatcaataaaaacagcacaagcacaaatacgatcagaattctatattctgctgtcagaaatgcgcgggctccttcactaatcgcagatgcaatttctttcatcttttctgttccttctgcctgtttcgaaactttagaagccagatatgctgcaaaaatcagcgcaagtatcgatacaacaggaacaacatacattaaattttccataatctcctcctcaatttcatttttgagctcttgtatcactgcacctccatctatacaatgatacaacttttatagtttaacaaataaatgaataattttcaacaaagaatttcattgtatgtatgtttctcatatttttatttccatctctttttgtgtgtttttcctttatatactatatttaaaatttgtttttctatttattgttactattttttgtttattttgtatatttgttatttatttctcaatctctggcgttgtacgatttactaatttttgcaagtctgattttgtcatctttcattatctctttttttctacatagtatggattttttcgccctgttatggtaatctgattgcagagaggtgttatataatatgaagacattttttaaaaatcttgccattacaatcctttgcctgggtatctccacgatcctggcatttttcttttttcatctgggacaaaaaaattctgttaacactgcactgatctatattcttgcactgatcttgatcgcccagaatacaaccagttactggtatggtgctgctgcctctgtcttttgtgtcatcgcagcaaattacttttttacatacccctactttaaactaaattttatgctggacggttatcctgttacttttattggcatgctgaccatttctctgattacgagcacaactgccactatgctcaaaaaacaaaagatcattgctgcagaacgggaaagaaagctggcggaagctgagcgtgaaaagattcatgccaatcttctgcgtgccgtatcccatgatctgcgtacccctctgacaagcataatcggctcttctgcctcttatatggaagatgcacaggatatgtctgatcaggagcgtatggagctgatttcgaacattaacgaagatgcgcaatggctcctcaacatggtcgaaaatcttttgtccgttacaaaaatccaaaacgaatccagcaaagtcaaaaagtccttggaaattgtagaagaagtcgtatccgaatccattgtccgacttcaaaaacgacttccggatatccggatccaggtctccatgccccgggattttctgatgctccccatggatgccactttgatcgagcaggtattgatcaatctgatggagaatgcttatgtccattcttcaagcgaggatcccattgatcttctaatcacagaacagacagatgatgttcgatttacagtccgcgattatggaatcggtctggatcctgagcagattccttttatcttcgatggacagtataactccgatgctgcagacggtcataaaggaatcggcattggtctgtctatctgcaggactatcattcacgctcatgatggtgagatccatgctgccaatctggataaaggagctgaattttcctttacccttccaaaagaaaaggagaacaaaaacgatgcctaaatttactgtattgatcatagaagatgaaaaaaacattcaaacatttgtcggaaaaattttaaaaaaacaagattaccgcgtactctatgcagactgcggaaaagaagggctcaacctcatccactcgcaatgtccggatatcattcttttagatcttggtctgccggatatgaatggaaatgacatcattcaggaagtccgtacatggaccagtaccccgatcattgtcatctctgctcgaaataccgaaaaagaaaaggtacttgctctggatcagggcgcagatgattatattacaaagccttttggtacttccgagctgcttgcccgtatccgtacttctttacggcacagcaaccgcctgtatacctctgattccctttatatacgcccttatcgctacgaagatctggtgttggacttttccaaacgggagatcaccttaaacaaagaacccgtccatctgactccgattgaatataaaattgtatcctatcttgcacaaaactccggaaaagttatgacgtatgctgccatcatttccaacgtatggggaccatacgcagatgatgacaataaaatcctgcgtgtaaacatggcaaatatccggcgaaaattagaaaaagatcctgcacagccaaaatatattttcacggaagtcggagttggataccgtatgcaggaagattctgctgaaaatgaatcgtagattccccatgtgctaagattgcgctaaaaagggcataaatcgcttttctttttgtccctgtgtcactaaaatagaatctggtccgatacacgggcaatttcattcaaaggagtgacagtaatgggcaacaatatcgtaatgatacttttgatgatcatcggcggttctgtaggaattttttccacactgttcatcttgatcagtctgccggtaaccattatccaaaaatttatccgcaaagcacgttctggatgtaaattaacagattaactgcttttataaaacctcttttataaaaacagcagccacagatttttatttttctgtagctgctgttttttattctactgctattttttttacccttcccaatgctttttgtactgccggaatggagatgatcacgattgtaataagtccttctgccaaaaggaaactgtaattatatgcaattggatatattgctgtaagtgatttcgggaaattatccggcatatagtccatccagtataaatatccacccaatgcatgaaacgctcctcttgccaaaactgctgcaatgtatcccttaagcagtccgtgttttttctttgcaaaaaatcctgccacaccaagcgctgcaaatgcgagtacataatcgcagcatacctggaacagcgaaaggacatacggctcctgtaagaactgcagcattccatatgtaaatccgactaaaataccagtctttacaccataccagttcgccaccagcacgataaaaagcatactgcacagtgttacgcttccgccccatggcagagaaaaaattttaatataagaagtaataaatgcaagtgccattgccattgcacagcacgcaagctgttttgctgtcattttttgcttttcagaactctttcccgcaaaaaataatgccgcaccaaacatcaaaattcccagtacaatacagattgcatatccggcagtcgtcagcccaccctcagcgtttatcataaaatctaacataaaaatacctccttgctttcgagattgaaaacaaggaggcattccttgaataaacgagattacagttcctacgttggcattatccaaatcaggttataggtcgaagtttacaacttcctctcagcctgtcacacaagctccccttgttatcaatcgtattttattttattcttcgtccagaactacttcttccaaagcctcagatccaactgtatccaccgcttctgctgtttcgttttcttccagttcctctgcttcttctgtttccagttctgtgtttaatttcacatcacggtatttcttcatacctgtacctgcaggaatgtgtttaccgatgattacgttctctttcagaccgatcaagtggtcaactttacccttgattgcagcttctgtcagaacttttgttgtttcctggaaggatgctgcggaaaggaaagattctgttgccagagatgcttttgtaataccaagcatgatctgctcacctgttgcaggttcttttccttctgcttccatctgttcgttcacttcattgaactccagaacatctaccattgttccaggcaggaattctgtatctcctctttcttcaatccggatcttcttcagcatctggcgtacaatgacctcaatatgtttgtcattgatttctacaccctgcagacggtatactctctgtacttcctggatcatgtaatcctgtacagcacgaagtcctttgatcttcaggatatcgtgtggatttacactaccttctgtcagctcatctccagcctccagatgtacaccatcctgaatcttaatacgagagccgtatggaatcaggtatgctttggattctccagtctgatcatttgttacaatgatctcacgttttttctttgtatcactgatcgtcgctgttccggcaaactctgtgatgattgcaagtcccttcggttttcttgcttcaaaaagctcttcgacacgaggaagaccctgtgtgatatcgtcaccggcaactccacctgtatggaatgtacgcatggtcagctgtgtacccggctcaccgatagactgtgcagcaatgataccaactgcctcaccaacctgaacagcttctcctgttgccatgtttgcaccgtaacattttgcacaaacaccgttcttacatttacatgtgagaatggtacggatcttcactttatccagtggttcaccgttttcgtcaactgctttcttcatgactctttctgcacgcttcggtgtgatcatgtggtttgccttgacgatgatatttccatctttgtctttcagatcttcacaggagaatcttcctgtgatacgttcctgcagactttcaatttcttcatttccatccatgaatgcttttacatacattcccggaatttcttttccttcttctgcacagtcgctgtcgtgaatgatcaattcctgagaaacatcaacaagacgtcttgtcaggtatcctgaatcggctgtacgaagcgctgtatcggacattcccttacgagctccatgagcagacatgaagtattccagtacgtccagaccttcacggaagttggacttgatcggcagctcgatcgtacgacctgctgtatcggccatcaaaccacgcataccggcaagctgtttaatctgcttgtcagatccacgggctccggaatctgccatcataaagatgttgttgtatttatccagaccggaaagcagagcttctgtcagcttatcatccgttgctttccatgtctcaacaacttctttgtaacgttcttcttctgtgatcagaccacgtttgtagttcttggtgatcttatctactgtatcctgcgctgcctggatcatctcaggcttctgcggaggcactgtcatgtctgaaatagatacagtcatcgcagctcttgtagagaacttataaccaattgcctttacatcatccagtacttcagctgtctgtgttgctccatgcgtattgattactttttccagaatctgttttaactgtttctttcctacatggaaatcaacttccagaagcagttcgtttccttccacttctctgtctacaaatccaagatcctgaggaatgatctcgttgaataacattcttccgagtgttccgtcaatcgtacctgtcttcacagttccatccggcatttctttggaaacacgcactttaattctggagtgcagtgtcacatatccgttttcatatgccaggagtgcttcatttaagttcttaaagaacattccttcacctttagctcccggtctttcctgtgtcagatagtaaataccaagaaccatatcctgagaaggaacagctaccggaccaccatcagacggtttcaacaggttgtttggcgaaagaagcaggaaacggcattctgcctgtgcttctactgacagcggtacatggacagccatctggtcaccatcaaagtccgcattataagcagtacataccagtggatgcagcttaattgccttaccttctaccagaattggctcaaacgcctgaataccaagtctgtgcagtgtgggggcacggtttaacataaccggatgctctttgatcacttcttcgagtacatcccaaacctccggctggagtctctctaccatcttcttggcatttttgatattgtgtgcagttccatttgccaccagttctttcataacaaatggtttgaataattcgattgccatctcttttggaagaccacactgataaatcttcagctctggtcctaccacgataacggaacgtcctgaatagtctacacgttttccaagcaggttctgacggaaacgtcctgatttacctttcagcatatctgacagagatttcagtgctctgttaccaggtcctgtaaccggacggccgcgacgtccattgtcgatcagggcatcaaccgcttcctgcagcatacgcttctcgttacgcacgataatatccggtgctcccagttcaagcagtcttctcagacgattgttccggttgatgattcttctgtataaatcatttaagtcagatgttgcaaaacgtccaccatccaactgtaccattggacgaagatccggcggaatcaccggaattgctgtcagaatcatccactccggtttatttccggattcacggaatgcttctactacttccagacgttttacgattcttgctctcttctgacctgttgcattcacaagtcctgcctgcagttctgcatattctttttccagatcaatggattccagcaactctttgattgcttcagctcccattcctacgcggaatgctttgctgccccatttttcttttgcttcctgatactctgcttcagacaagatctgtttgtactgaaggtctgtctcccctttgtccagtacgatataagacgcaaagtaaagaactctctccagtgttcttggagaaatgtccaggatcaatcccatacggcttggaatccccttgaaataccaaatatgggataccggagccgcaagggcaatatgccccatgcgctcacgacgtacagatgcttttgtcacttcgactccacatctgtcacaaaccacacctttgtaacggatttttttgtattttccacagtgacattcccagtccttgcttggtccgaaaattcgctcgcagaaaagaccgtctttttctggttttaacgttctatagttaatggtctccggctttgtaacctcgcctcttgaccactccatgatcttttccggtgaagccagtccgattttgatcgcatcaaaagttaacggctgatattgttgttcattattgcttgctggcatataaacggctcctcctattcttcatcatccatgaattcatcaaattccagttccatttcaggagcaaaatcttcttcctcctgtggttctacattctccagttcttccccaacgaattcctgctctgtgaatccatgtgctccgaaagattctttctcatcacggtatttcttgccttcgatgatcgagcgcaggtctgtctcgccataatctacagtttccatgatttcaacttctgtgttgtcatcacggagtacacgtacatcaagagcaagagactgtaactctttgagcagtaccttgaaggactcaggaatacctggttccggaatattttctcctttgataattgcttcatatgtcttcacacgtcccacaacatcgtcggatttcactgtcaggatttcctgcagtgtgtaagatgcaccataggcctccaaagcccaaacctccatctctccgaaacgctgtccaccgaactgtgctttaccacccagcggctgctgtgttaccagtgagtaaggacctgttgaacgagcatggatcttgtcatctaccaggtgatgcagcttcagataatgcatatgtccgattgttaccgcactgtcgaagtactctccggtacgtccatcacgcagacgtacttttccatctcttgaaagcggcactcctttccaaagcgctctgtgctcacggttatcagacagatactgaagcacttcaggaagtaattcttctccgtgtttcttctcaaactcttcccattccatatttacataatcatttgccagatccagcgtatccatgatgtcaatctcgttcgcaccgccgaataccggtgttgcaacattaaagccaagtgcttttgctgcaagacttaaatggatctcgagcacctgtccgatgttcatacgggaaggcacacccaacgggttcaacacgatatccaaaggacgtccatttggaagatatggcatatcttctacaggaagtactctggaaacaacacccttgttaccatgacgtccagccatcttatcaccaacagaaatttttctcttctgtgcgatatagatgcggacagactgattcacacctggagaaagttcatctccattttctcttgtaaatacttttgcatctacgataataccatattcaccgtgcggtaccttcagagaagtatctcttacttcacgtgctttttcaccaaagattgcacgaagcagtctctcttctgctgtcagctctgtctctcccttcggagttacctttccgaccagaatatctcctgcacgcacttctgcaccaatacggatgatacctctctcatccagatctttgagtgcatcgtcaccgacaccagggatatctcttgtgatctcttctggtcccagtttggtatctcttgcttctgcttcatattcttcgatatgaacagatgtataaacgtcttctgcaacgaggcgctcacttaacagaaccgcatcctcgtaattgtaaccttcccatgtcatgaaaccgatcagcgggttctttccaagagccatctctccattggatgtagacggtccgtctgcgatcacctgtccggcttccacacgttctcccttgtctacgatcggcacctgattgtagcagttgctctggttacttcttaagaattttgtcagtttgtatgttttctttgttccatcatcatgtttgatcgtaatacttgtagatgtagagctctctaccacacctgctctctccgcaaccatacatacaccagagtctactgctgcttttacttccatacctgttccaactaccggagcctctgttgtcaaaagcggcactgcctgacgctgcatgttggatcccatcagcgcacggttcgcatcatcattttcaaggaatggaatcaatgctgtcgcaacagagaataccatctgtggagacacgtccatataatcaaatttacttctctcatactcctgtgtctcttcacgataacgaccggatacatttttatgaaggaagtgtccttcttcatccagaggtgtattcgcctgtgctacgtgataattgtcttcttcatccgctgtcatatattccacttcatctgtaacaaccggattcatcggatctgtcttgtcaatcttacgatatggtgcttcgataaatccatactcattgattcttgcatacgtagcaagtgagttgatcagaccgatattcggaccttcaggagtctcgatcggacacattcttccatagtgagaatagtgaacgtcacgaacctcaaatcccgcacgatctctggaaagaccaccaggtccaagtgcggacagacgtctcttgtgagtcagctctccaagtgggttgttctgatccataaactgagacagctgagaagaaccaaaaaattcttttactgctgctgttaccggtttgatattgatcagagactgtggagaaactccgtcctgatcctgcgttgtcattctttcacgaacaactctctccagtctggacagaccgattctgtactgattctgaagaagttctccaactgcccggatacgtctgttgcccagatggtcgatatcgtcatcatttcccattccatattccagatgaatgttatagttaatagaagctaaaatatcttcttttgtaatatgtttcgggatcagatcgtgaatatctctcttgatcagagatttcaattcttctacatcccctgcagactcttccagaagtcctgccagtacagggtaatatacctgctctgtcactcccacctctgccggatcaatatctacaacagcctgcagatctaccatcatgttagacagaatcttgatattacgggactcgtcctctccctctacccatacaaatggagcaccactgttctggatcgcatctgcaatctcagctgtgatgagagttcctttttccgcaacaatctctcctgtcagttcattcacaacatcttctgctacgtgctgacctttgatacggtttttcagtgccagttttttgttgaacttgtaacgtccaactttggcaagatcataacgtctcggatcaaaaaacatacttgtaataagactttctgcactgtccactgcaagcggctcacccggacgaatcttcttatataactcgagcagaccttcctgatagttctctgctgtgtcctttccgaaacttgcaagaatttttggttcttcaccaaacaaatcaatgatctctgcgtttgttccgataccaagtgcacggatcaacactgtgatcggtacctttcttgttctgtctacacgtacatagaaaacgtcattggagtctgtctcatattccagccatgcaccacgatttggaatcactgtagaagaatacagctcttttccaagtttgtcatgtgcgattccataataaattcccggtgaacgaaccagctgactgacaataacacgttcagcaccattgatcacaaatgtacctgtctttgtcatcaatgggagatcccccataaaaatctcatgttcgttgatctcatcagtctctctgttatagagtctgactctcacttttaaaggtgcagcataagttgcatcacgttccttacactcttcgatcgtgtacttcacgtcatcctcgcaaagtgtaaaatccacaaattccagactgaaatgacctgcatagtcagaaattggagaaatatcatcaaatacctcttttaacccttcatccagaaaccactgataagaatctttctggacttcgattagattcggcatctctaatacttctttttgtctggaatagctcatgcgagaactttttccacttgtgatgggacgaattctgtttttctccatatgacgtttcactcctcatatatttttttgcgggcaacaagtgcccttcaataggttccagtaaataggaaaagagccctgtgacaatatttctcttcacttcatggcatacctttccataatagcgcatttttaactatatcacaaaactcttttttctgtcaatatattttgagttatttttcaaaaaacctcttgacaagttttcgtatctatgctattaacgtaaaaaccgcagaagcgttcatcttctgcggtcctcatcctgcttatatcagcaattatttcaggttaacttctgcaccttctgcttctaatttagctttgatttcttcagcttctgctttagaaacgccttcttttactaccttaggagctccgtcaactacttcttttgcttctttcagtccaagtcctgtgatttcacgaacaactttgataactttaaccttagaagatccagcagatactaattctacgtcgaactcatctttctcttctgctgctccagctccgtctccagctgctgctgcaactacaacacctgctgctgcagaaacaccaaattcttcttcacaagcttttactaattcatttaattctaatactgataactctttgatcgcttcgatcatttcagctgttgtcaatttagccattttcatatcctccatattcattgatattctgattatttttatactctgccgcatcctgtacggctacccatcaaggcagatactgccgggtataaaatgtaattccaattactctgctgttgtctcagctgcttcctctgcaggagcttctgctgtctctgcaacttcttcgccatctttttctgcgatctgtttgataacacgtgcgaagtttgtaattggtgactgcatacttccaagtaatctggaaagcaatacttctctggatggaatcttagccagttctgaaagtgctgccacatcataaactgttccttccactacaccaccttttaattcaagcttgtctgctccttttgcaaactcgcaaagaattctggctggtgctgttgcatcttctttagaaattgcaatcgcacttggtccttccagacatccctcaagaccttcgaattcagttccttcgaatgctctcttcatcatcgtgttcttatatactctataagtaacacctgcttctctgagctttttacgaagttctgtatcctgagcaactgtcagtccacggtaatctacgagaacaactgactgagctcctttcagttcttctgaaatcgcctcaacgattggctgttttaattctacttttgccatgttcggtacacctccttattttattgtgcgtgtactgccaaataaaaaacctctgtatccaaagacacagaggtttacaaatccgaaattgaattcgcatacttcctcggcaggcgttttctccttatgcctcacggcacctgctgtcttcggcagtcaattgctatattataatagcactttatattgtcaatgtcaacagttttttaaaccagtttcattgggttgatttttacaccaggtcccattgtagatgtcagtgttacgctctttaagtactgaccttttactgctgccggtttagctttgttgattgcatcgataagcgtctggaagttgtccgctaactgttcttcagtaaatgaagcttttccaatcggcacatggataatgtttgttttgtccaatctgtactcaatcttaccagctttgatatcgttgatcgcttttgttacgtccattgtaactgttccagccttcgggtttggcatcagaccttttggtccaagtacacgtccaagacgtccaacaacacccatcatgtctggtgtagcaacaacaacatcgaattcaaaccatccttcgttctggatcttcggaatcagatcttctgctcctacgtaatctgctccagctgcttttgcttcttctgcttttgcatcttttgcaaatacaaggatacgaacttttttaccagttccatgaggaagcactactgctccacggatctgctggtcagcgtgacgtccgtcacaacctgttctgatgtgagcttcgattgtttcgtcaaatttagctactgctgattttttcactaatgcaactgcttctgctttctcgtaaagatttcctctttcgatcagttttgcagcttcgatatatttctttcctcgtttcatttcaaataacctccttgtggtattggcgggaacgtgcccctcccactttttcgtgaatttacatataacatagattgtctcttccttctccctgaagacaccaggaagaattcttcagacgacctcaaatctctgcttcttgtctggcagttatctcttactcttctactgttacacccatagaacggcatgttccggctaccatgctcatagctgcttctactgttgcagcgtttaagtctggcattttcatctcagcgatttcctgaagctgagcttttgtgattgttgctacttttgttttgttcggtacaccggaacctgatttcaggttacatgctttcttaatcagaactgctgccggtggagtttttgtaacgaagctgaagcttctgtcattgtaaactgtaataacaacaggaatgatcaggtctccctggtctgctgttctggcattgaactgttttgtaaattcaacgatatttacaccgtgctgtccaagtgcaggacctaccggtggtgctggagttgctttaccagctggaatctgtaatttaatatatccttctactttttttgccatttttcattacctccttgtggtattggcgggatttgtatccctcccacggttttttaatccatctttcttacttctgagaaattcagttcaaccggagtctcacggccgaacagctctacattgatcgacaggctctgtttctgttcattgatcgtctggatcataccaacagtgccttcccaagctccgctcagcacggttactgtgtcgccaacctcgaagtcaactacgatgtcttcctgtttgattccaagatttgccatttccgcttcttccaacggtaccggcttggatcctggccctacaaatcctgttacacctctggtatttcttacgacataccaggtgtcatcattcatgatcatatggatcaggacatatccaggaaacatctttttctgacttgctttctgaacaccattctttaattctacgacttcctgcatcggaactctgacttcaagaatctgatcttccaggtgacgattttcaattgtcttatcaatgtttgcttttactttgttttcatacccggaatacgtatgaactacataccattttgcatctgacataaaatcacctttccgcttctgaccagctatttcaccagaaaatcaattccgtatctcatcaatacatcgatcacagagatcaataacccgagtaatacagaaactgtaacaactgcagcagtctgctttgcaagagtgttcttatccggccagataatttttttaaattcggccttcattcctttaaaccagcttgacttctgagctttttctgctttttctgtctttccactcatacatccacttccttccaacgattatttcgtttctttgtgcagtgtgtgtgatttacagaatttgcagtatttctttgtttccatacggtccggatgtgttttcttatcctttgtcatgttgtagttacgatttttacattccgtacattccaatgtgattcttgtgcgcacaacttccacctcgctttttatttactttttacatgtttctttgatggctgcgaccccatctaattttaggcataaaaaaaagacctacttccattcgccagaaaattgtatcatatggcaatatggaagtcaagatatttctcatctgatattccaaaaagaaaatatgaaaatttttccggaaaatataacaagtttttctttctcccgcctgttatcctgtaaccatatcacacagaaattactaaatggaggattttcactatgaacaaaatataccgtcttggaattcttggacttggagaaggacgcagtgtcatatctgctgcactaaacagcccatattgggagattggaggaatctgtgatttaaatgaatccctttgtcagcagcgctgtacagaatttggactgacaaattacaccacccgctacgaagatctgttaaacgatcctcaaattgacgtcattgggatctacacccctgaccagcttcattctcttcatatccgtatggctcttgaagcaggaaaagatgtcatctgtacaaaaccactcatgacttctcttgaggacgcaaatgcccttctggcacttcagaaaaaatccgggcgtcacgtttttatcggacagagttctcggtattttgaacctgccaaacaacagagaaaggactttgaagccggaaaacacggtgatctggtcactctggaaacacattacatcagcgattcccgttggtttttagagcgaacatggagcagaagcaatggattctcctggatgtacaatttcatgatccatgccgtggatctggccgcatggtatcttccggacatcgaagaagtatatggcgtgggagttaccagccagaataccaaagactaccagctttccgttcctgatactatgaaattcatcttaaaagatacctccggaatctgcgccagcgtcagcggtgtttatgcagaacctacacttggttccagcgtggagcaatccatcagctgtacattaagaggaactgaaggaatcagccgtgccggatatccacaccttcagtatgacaccaattttactcccgttcaaaagactgctgtcagacacgattattctgacatgacagattactatttccgttttgaaggatggacacaccacgcaggcgaataccagaactatatggaggaatttgcacgttgtctgaatcagggactcactccgaaaccagacttaaaagaagggattcataccctggcaatcatggaggcaatggaaaaaagcattgaaaccggcaacgtgatcaaagtatctgatattctgaatgcacatgatatttcattcgattaaaaataccgcttctgcatcccggcatcgatgcagaagcggtattttttacttacaattccatccttttttgataaaatcctgcttcgtaatttctctttcattttccacgcgcacactacagtcaaaatctctccagcacacagacactgtctgcggtgttttggttttcaaaacagcacgctggaactctccgtccctccattccagatcaatttccaaatttccccttgcatggaacgaaaaaacctttccatttctccacgccttcggaagtgccggcaacagccggatccgatttcgatggctttgtatcaacatttctcctatacagctgcaaagccccgtatttccgtccagttcatatacgtgatcaaatgctgctgctcctcttgtcggcggatgatataccataaaattcggctccaacagatgttccatcatgtaacaaatatgtgcatatgcattttctccattttgaagccgtgcttcatacagcatcagcatcgaacgtgcccatcctgtatcctcccagttttcaatcggtgtcaattttctttgtaatgttttttctgcggcctcacacaaatccggcgtctcttccggagtgatctgcgcaaacggaaacaatccaagcaaatgactggtatgacgatgttgtgggtctgcttccggcagatcatgattccattctgcaatacatccattttccagaatccgatacggaagcagtttttcagaaatttctgttattcgtgcgtacctttccttctttgacattcccaaagcatccgaagctttcttataaatagagaataattctcgtatcattagaatttcataagtacaaccggaactgatctgtcttgcatttcctttgtataagaaactattttccggagaaactgccgggccacaggtatacgctcccgtttctgtctgatatacataatccagaaaaaactccgcagcttcttctattaaaggaaatacctttttcaggaactcctggtcttgtgtatagagatagtgttcccagatatgtgtcaatatccagaccccgcccgtcggacacggggcgattggagatgcccagtaaggtgccgcatatccccacgcattcgacacaatttcgccaacccatccatgcattccataggacagacgcgccgttttccttccttccggcaccagtctttgttcaatccatcgatataatggctctattgtaaattccattcccgaaaattcagccggccagtaattcatctgtgtattgatatcaagatgcatatcacatgtccatccaatcctgcaggccacattatcgttccagattccctgcagatgtgcaggaagttttgaatcttctctggaggaacaaaacagcaagtatcttccatattgaaatgccaacggaattttccgggaaacagaatctgtcccttcaatttccagccgggttccgtttgtgaactgcttcatgtcttcctcatgactcctgatcacttctgcactgcccttttggactgcgttcgcacagcgatccaatgcagtctgatacatacacagctccgggagagcagagtcttcaaaattggtttccattgcaacatatacctgtgcagttctgcagtttctgatccgcagcccatttttctcccactcttgcagtccatctgtcactactttcactgccccttccagatgcacaccacactttcgatcgcaatgcagtgtttcaaatgcatctgcaaaaaagcgaatcccatcctctgccggtttcatcccaccttcttggttataaggctcaaaccaaagttttaaatccgttttacagctacattcaatagaaatcatcaatactttatctggatgagaagtgcggatttcttcaaaaatccgcacttcatcaccttctcgtagaacccatgccttccccgtttccagttccagacctctttcatatctttgtactgtattttctatttgatatttcacatacaactttccggtcggcagatgcgttccataattttctcgtctcccgataaacttctctgcttcctgatgcacctgatcgtaatttcctgtctgttccgcctttctcatcttttgaaaggcctctgccgccccttcctgattggctgatttttccacctctccactataaaatgtatgctctgtcaagtcgatttcttcgcaatttacacccccataaaccatcgcaccaatctgcccgtttccaagcggcagcgcctctccccatcgcgatgccgcttttccatatatcagtctcataattttacttccttattcttttacaccaccggatgtcatgccgccaataatatatttctggccgatcaggtatacgatgataaccggaatacaagtcagaataatatctgcaaatacaaaatgccaccagtttttattttttccaaaaaattgatatactgccattgtcatcggatacattttacttgaattcgacagatacaatggtgttaaaaagtcactccagatccccataaactgtaaaataaaacaggttacgatcgttggtttcatcaatggcgcaattactttaaaaaataacgaaatcggtccacatccgtcaataatcgcagcttcatccaactccaccggtatggatgaaataaaatttcgtattgtgaaaatacaaaatggaatcatagaactgataaatgcaataatgattcccggttttgtattcgccagattaaatgtctgaagcaccttcaccagagttacatagttaattgggaagaataagccacagattacaaaatagtacaggaaattattgattttcgttttatttctcgccataacaaacgccgccattgcacatcccaacactccaattattgtggaaattcccgcataagttaaggaattgcaaaatccctgcaccagattcgcttcctcgattacttccagatatgtctcaaagtgccactctgtaggaagtgcaaggctcattctcgctgcttctgcctttggtttcagagaattgataaataccatataaaatggaagaattacaaccgtgcaaagactgagacataccagatgtttcaaaacattactcactgtttttttcatctactgctgcacctccctcttgctcattatcctgactaccgcaattccgattactgccgtgatcaacaacaaaattgcattcaatgctgtagacattccataattacctgtcgaatataactggaaagaatatgtagtcaatacttctgttgcatgtcccggaccaccatttgtcaatacatacacgatatcaaacactttcaggccatatgtaataccaaatacaagattgatcataattgcccccgaaagcattggaagcgtaacatatctcagccgctgccagaaattagccccatcaattttggcggcttcatataacgatttcggaatcgtctgcaaacctgccaggaaaatcgtcatacagtatccaattcctctccatgcatccactccaaaaatcgatttccatacaacatccagatcagacagccatttctgttgcaaaaactcaagatgcaatgcccctaaaactgtgttgagaagtccatgatcataattgaaaatacttttaaatacgattccaatgatcacaaacggcaaaatagacggcaaatacaaaatcgtcctgtaaataccttttcctctcagcccttcctgcagcatcactgccaaaagaagtgcgggaatcagttttacaatattggaaacaactgtaaacatcagcgtatgcagaattcccgacgcataatctgtatcagatataaaaatttcaatatagttttttaaccccacaaaatgtgtcccatctatcgcacttctggaactccagtctgtaaaggaatatccaactcccaaaagacttggacttagaaaaaaacaaatataaaacaataacggtatcactaaaaaccaccatggatatattttattttttttcacggtatcaccactttcttttcataaataatgccatattttgtttctattttcagtgaacaaaatatggcatcctactttcactcttctgaatattctcctattttatctggttattgccagtttggatccttcgctgtttttgctgcttctgctctgtttttatccatatttttcagaatttcatccgcatctttgatcgttccctgacaatatgccaccaaatcctgtccaaactgattccagaaatcattggtgtattttgttcctgtctgtaataccggtgtctccatctgctcttctgtcagactttccataaattcctcttcttccggcagccagtgctgttccagattttcatcgagtacatccagatttgtaaatactggtgagttatccagaatttcctgcagactttctgttgttgtcacaaagttaaagaattcttttaccaattccggatgttctgatttctgataaccaaacattgtcggaccacttgggtttgtcggataatactggttatctgcaaatggacacaggaataatccgaattcatcttctgttgcagtatcttctttaatttgtttgataactccggatccagaagttaccattgccgcttcccgatctcccagagcattgatcagattcgaagaatctgttccgatccaatcttctccaaaatatcccaaatctgaaaattctttaaactgttccaaagatttctgcatcaattcattgcccgaaaacgttgctttgtttgtattcaaagcttcatataatccaggctctgccgcttcataaactcctccaatctggaagaatgtcaactgatgctgccatccgtctgccccgggcatataccatggtgtgattccttcatccataatctcaccacacagttttttgaagtcctcatatgttgtcggtacgttccatccattctcttcaaatagtgttttattatataccatcacgcagtccggagagttgtgataaatctgcagtccatataacttatcatcatacttacaggacgaaagccttgtctccggcataatcttttcccattccgctcccgtaaaatctatacagtattcttccggatttacgatcactgactcgatcgcaaatggattggattgaatccagaacacatccgcacaggaatctgtagtcagttttgactgaagaagatctgaatactgatctgccggtatcgtctggagatctactgtgacatcatattcctcttcaaatcgttcaatcgtgtcatcataacgattatccatccatcctgctgatgtcaaaatactcaatgtttctccggaaaactcactttccccttttttctctcccgattctgattttccgcatccagctagcgctgtcattgccatactcatacataacactgctgctaatactttctttttcatgattttcctccttgtttcgtacctttattgagtcatattctatcgaatccccacagataaatctatgtattttttaatatatattttgaactttttttacactttttatttctttttcataaacaaattcagcttttccatttttcaatttggtgttatagtataaatacttatgatttttttgagaggattttagatatgattttcaacagacatcgaaagcttcaaacacagttataccttgcctatcttggaattattttattctttctcgggacattcagcattttcttttatgtttttgtctccggcaaactaaaagacgaagcatttgaacgcttgtacaacaataatctatctctgaaagattctgtggaagcgaacattgaagatatggacaatgtttcaatcaacatcaattacagcagcattgtagaaaatacgctctcctatgattttaacctcaagcaagaccgaaactcttacaaacgtctggctgatctttttgtcatgctcaacgggacaaacagtcgggctgattatatctatctttatgacctggaaggaaattgccttcaggtggattccgttcaaaagctcacacagattgatctggaatctcaatcctggtatgagcctgtgatgtcccaaaaaggcgccttattcctcagtactccttatgagaaaaaaatcggagcttacactaccgatgtaatttccttgtaccgtacctatgtgaattccacccagaagacagtaggaatcgtggagactgtcaaaaactgcaaaagcctttttaattccattatccgttttgaaaagaaaacaaccacaccaaccaggatttatatctataatgagcaaaatgaacgaatctatccgtacaaaactgatactccaaatcctgattatccccgtcttccccgtacggatacaggagtttctttgaatgatataaagattgaaagagtggacaatcctatcacttctcagaaagaatatctgactgctctgccatcctcctataccggatggacctactatgcagtccagaatgaagccgatatcctcgctccggtgaatgcccttaccaaaatgcttctcattttcgttgccattctgatcgtaattgccagtattgtctctcactatctggccaagcgactggctcatccgatcgcccacttaaagcacatgatccagagaatgcagctttctactctcggctcggaatctccggcttcttatccggtcttctctgtcgagttgaaagaattatatgattccttttcagaaatgaaccaaaatctgaaaaactcccgtgatcagcttttaaaagtccaggaagcagaactggaagcccgctctcttgcgctccagtctcaaatgagcccacacttttattataattctctttccagtattatgatcctggctgaaaacggagacacaaaatccgttgccggcatgtgccagaatctgtcacggatcatgcgctatgtcacggactttaaaacacggatcgtcagtatccgggaagaacttgattatatcaaagaatatctatactgcatgaaaatgagaaatcagtccagtctccaatatgagatccaggtcgatgattctttgttggacatcacactcccgaaactctgcattcatccgcttgtggaaaacgcattgaaatatggaaccaattgttcccctccatggactgtaaaaatttacagcatcacccggaatgatttctggaagatctgtgtagaagataccggtcccggattttccaaagaagcactcgatcagctaaaggaacaagtccagacatttgcctctaattcttcagaaatgccaaaattacagatcaacggactgggccttgcgaatatttacattcgaatgtcaatctattttgaacatgattttatctttgaatacggaaatacagaagaaggacacgcctttactgcgataggcgccttctatcgaaaggagaactgatatgcaatatgacgtaatcattgcagaagacgaagaattgattttaaataatttaatacaaaaagtgaatgcccatcctgcattcaaagtaattggatctgcccagacaggcaccgatgctttaaatctggtaaaagaacattccccgatccttcttgtgacagacattcgtatgcctgtcatggacggaatggagcttctcaccaaaacaagagaactttatcctgatatgaagtttatcatcatcagtggattttctgattttgaatatgccagagaagccctgcatttaaaggtatatgactatcttttaaagccggtttctcaggatgacattcatgaaatactgtcgcggcttcaaaaagacctggaattagaaaaagaaagttatcaaagttatttttcagaagactacacacacattgcacctgccaaaattgccggactgctccatgagtttatcaccacacactatcaggacaacctcaatttaagcatcattgcccagacaatgaactactccccgagctaccttactaaaatatttctgcaggaatataactgtactcccatcaaatatttaaactcactccgtctgaaaaaggcctgttccctcttgatctataacccggaactgacgatcagccagattgccacactgaccggatatgaagatcaaggatatttcagtcggacttttaagaaaaattttggtatctcaccactccagtacagaaaaaatcgcgaagaatgatcccttattttctttcatcctttggtgacctgtcaaaaaatttgtgataggtgcgataaaaatttgaaagattctgaaatccacactcataggcaatctccgtaactgacagatatgtggtcctcaaaaggcgtctcgcctccttgatccgaatccgggatacatattcgctgaagttcatattggcagcttttctgaagtaagtcgaaaaataattcgtactcatatgacaggatgctgccacttcttctaaagtcagtctttctttatatctctcatctatatagcggaacgcctcctctaagcgatgcattgccgcatccttctctcttagacatacatttgattttgtaatatcctgataatgtcgaatcaacaatgtcagaatacacaacacgtctgctctgatcatctgacgatacccgacttcttttttctgctcttctttttcaatctccagcataatttttcggattctgtcggcctctctttcattctgtccgatccgatttttaaaattcccccctcgttctgcaaaaggccgcaaatactcttcccctatgacgtccagcttattcgatacaaactccggctgaaagatcataaccagaagatgcatatcttcttccagaccaatccatccatgtggctctgtattattaaatatgatcagatcccccgcttccatactgtactcattgccgttcacaaaatacctgccctttcctttttgaacaagagtaatctcacagtaccgatgccagtgaaatgaatcctcatcattttcctgaacttttgccacatacggatatatcgcaaattcaaatcctttttcaaacaataacgtatcttctatcaggtgcatttttttctcctccaatattctgtttttattctacacgattaccagaggattttcctcccctattttttagattttttactcaatattctgttttttacttttgcaaatggaaaaactgctcaacattttatcttttttttattgattttgtctttcaaatatgtataattgtggtagggatattgctatgtctgcatttgcagttcattgctctattactatataagaaaagaggtttaacgtaacatggcacagattgatttaagcaagtatggcattactggaactacagaaattgtgtacaatccttcttacgaaacattatttgaagaagagacaaaacctgaactggaaggttttgaaaaaggtcaggaaagtgaactcggtgcagtaaacgtaatgactggagtatatacaggacgttcacctaaagacaaattcatcgttatggatgaaaactctaaagatactgtatggtggacttctgacgaatataagaatgacaaccacccggcttctgaagaaacatgggctacagtaaaagatatcgcattaaaagaactctctaacaagagacttttcgttgtggatgctttctgcggtgctaacaaagatactcgtatggcaatccgtttcatcgttgaggttgcttggcaggctcactttgttaaaaatatgttcatccagcctacagaagaagaattaaaagacttcgaaccagatttcgttgtttacaacgcttctaaggcaaaagttgaaaactacaaagaactcggactcaactctgagacagcagttatgttcaacatcacaagccgcgagcaggttatcgtgaacacatggtacggcggagagatgaaaaaaggtatgttctctatgatgaactactaccttccactcaaaggaatcgcttctatgcactgttctgcaaacacagatatgaacggagagaacacagcactcttcttcggtctgtcaggaacaggtaaaacaacactgtctacagatcctaagcgtctcctgatcggtgatgacgagcatggatgggatgataacggtgtattcaactttgaaggtggatgctacgcaaaagttatcaatcttgataaagaatctgagccagatatctacaatgcaatcagacgcgacgctcttcttgagaacgtaactctggatgctgaaggaaagattgactttgatgacaagagtgtaacagaaaatactcgtgtatcttacccgatcaaccacatcgaaaatatcgtacgtccggtttcttctgcaccggcagcaaagaacgtaatcttcctgtctgcagatgcattcggagtacttcctccggtatctgttctgacaccagaacaggctgagtactacttcctgtctggattcacagcaaaacttgctggtacagagcgtggaattacagagcctaccccaacattctctgcttgctttggacaggcattcttagagctgcatcctacaaaatatgcagaagagcttgttaagaaaatggaagcaaacggagcaaaagcatacctggttaacacaggatggaacggaacaggaaaacgtatctctatcaaagatactcgtggtatcatcgatgcaatcctgaacggagacattgcaaatgcaccaactaagaagattccattcttcaacttcgaagttccaacagaacttccaggtgtagattccaacatcctggatccacgtgacacttatgcagatgctgcagagtgggagacaaaagcaaaagatcttgcacagagattcgttaagaactttgcaaaatacgaaggaaatgaagctggaaaagctttagtttcagctggtcctgagctttaatttgaaattttcataaatgaaaaaggtccaaggttcacgccaaccgcgcgtggatcctggatcttttctttttaatagacactttgtctatcttatgtctattttccctatttttttgtcattttatccagttttattatacattatgtctaaaaacatttgactttctttccctcttgctttacactctatttatacttttttaatatttaaagaactggagaggattatgtacaaagtttatgaaatcaaacagcgtgtcttcgctgacaatgatctggaagcagataacgtgcggacagaattgaaaaaagacaaaacatttctattaaatctgatgtcatctcccggtgcaggaaaaacaacaactttgactcagaccatccatgcactaaaagatacattacgtatcggagtcatggaagctgatattgacagtgcggtagatgctgataccatcagcaaaaccggcatcaaagtcattcagcttcacactggtggaatgtgtcatctggatgccgatatgacccgccaggggctttcgcaactggataccagtgacgttgatcttgcgattttagaaaacgtaggaaaccttgtatgtccggcagaatttgacaccggcgctgtgaaaaatgccatgatcttaagtgttccggaaggggatgacaaaccattgaaatatcctctgatgtttcaagtttgtcaatgtcttctgatcaacaagatggatgttcttccttattttgactttgatctggaagcatgtaaagaacgggttcggaaactgaatccagacatcaagatcattccaatctctgcccgtacgggggagggcatggatgaatggattcaatggctgaaagagcagaccatatcctggaatgaaacaaaagaaaaggagtaacggaatgaaagaagagcgtaaactgattctaaaactggggcagatgatcacagaccgggtaggggtcaaagtcacagtgaatgatcccgagtactggggactcgcagaagttctgacagacgaaatggcagaagtctgtctttccatgaaagtcagaaagcctatgacactggagcaaatttccaaaaaatccggcaaggatccaaaacgtgttcaggaattgctggatgaaatgtctgtcattggaatgatcgaatataactgggaaaatgcagatcaccagaaacaatatgtactgccaatgttcgttcccggctgtgctgaatttatgatgatgaatgaaaagcaagtggaagaacatccgatcctggcagatttttttgaaaatatgtcccgacttccacttgaaaaagtcacacctatggttcctcccggaggatccggaatcggaatgcatgtcatccctgtagaaaaagcaattcctgcaaaacaggagtctgcaagtgtagaacatatttcccactggctgaaaaaatatcaggataaatatgcagtcggtgcctgttcctgccgccgccaacagcgcgtccgtggtgaaggatgcggcgaaattgaaggggatctctgcattggagtaggcgatatggcagactatttagtcgaaaccggaaaaggacattacatcacagaggatgaggttctggaaattctggaacgtgccgaaagaaatggatttgtacatcagatcaccaatattgacggagaagataagatctttgccatctgcaactgtgcacctggtgtctgcaatgcattgcgtacctcacagttgttcaacactccgaatatgtcccgttctgcataccgtgcccatgtggatgcaagtaaatgcgttgcctgcggacagtgtgtggaagtctgtccggtaggagctgccaaactgggacaaaaactatgtacaaaacaaggagagatttcctatccaaaagctttgcttccggatacggaaaaatgggggcctgacaaatgggatcctgattatcgtgatcatgcaaaaatcaactgttatgacactggtacttccccttgtaaaactgcctgtcccgctcaccttccagtacagggatatattaaaatggctgcagaaggccgctatctggatgcattaaaactgatcaaaacggaaaacccattcccggcagtctgcggagcaatctgtaaccgccgctgtgaagatgcatgtacacgtgctacgatcgaccaggccgttgccattgatgagatcaagcgatttattgcagagcaggaattgaaagaaaatacacgatttgttcctctctgtgaaaaccatgaaggaaaacaattcgctcagaaaattgcagtcatcggtgcaggtccggccggaatgtctgctgcctactacttaagaaccaagggctatccggttacaatttttgaaaaagaagcccgtcccggcggtatgttgatgaacggaattccttctttccgtctggaaaaatcagtaatcgaagccgaaatcgatattttaaagcaaatgggaatcgaatttcgctgcaatgtagaagttggaacagatatcacaattccggaacttcgtgcacagggatatcaggccttctatgttgcgatcggtgctcaaggcggacgtaaagcgcaaattccgggagaagatgctgacggtgttacaacaggtgtggaattcctcagaaatgccaatctgaacgaagattccattcatttacatgggcgtacggttgtcattggcgggggaaatgttgccattgatgtcgcaagaactgctctgcgtgccggaagcgaacaggtttctatgtattgtctggaatccgaagctgaaatgccggctgcccgggacgaagtggaagaagcacgcgaagaagacattcaaatccagtgcggatggggaccaaaagaaatcctttccgaacatggatccgtgactggtattgtattaaaaaaatgtatctccgtatttgatgaaaatcatcgcttcgctcctgtctatgatgaaaatacatgtatcaccgtagcatgtgaaaatgtactgctttccattggacagaccattctctggggcgatctgttaaaagatactgctgtagaacttcgtccaaatcaggctgctgttgcagatcctgttacatatcagactgcggagccggatatcttcgtaggcggtgatgtctttaccggaccgaaatttgccattgatgcgattgctgccggaaaacagggatgtgtatccattcatcgcttcgtgcataagggacattctctgacactgggccgcgatctgcgtcagtttgtcgaattggataaaaacaatattgagattgaagaatttgatacagcaaaacggcaggtacctggcaaaaaagccggagttgccaaagatacgttccgcgacctgcgttcttcgcttacagaagagcaggtaaaaatcgaagcaagccgctgtctcggctgcggcgcttctatcgtagatgaaaacaaatgtatcggctgtggactttgcacaacaaaatgtgagtttgatgccattcatttgagtcgcgatcttccggaagcaagccgaatgcgcactgctgaagacaagctgaaaggtatccttccttatgctgcaaaacgtgccattaagatcaaattgaaaaagaaatcataaaggaacacattatgcatgagttaggaattattgttcatattaccaaaacgcttcaaaatgttgccaaagaaaatcacttaagtgaaattggatctgtcactttggaaatcggggaagtcagtacaatcattcccgattacctgacagactgctggaaatactaccgcaaaaaatttccactgatcgaacattcggaactgaagatcgaaatgctccctgccaccacctactgcgaagactgccttcagacctatcctaccgtagagtttggcagacagtgcccgcactgtaaaggctggaacacgtatcttctatgtggagatgaatgtaatatcaaggaaatcgaagcacaataaaaggaatgaaaagaggaaaaaaatatgttatttcatgtttatggggaaaatgccctgccgcagtggatcgccatgcttggcgtactcgctgcactgattctgttaaatgaagttgccagacgtactaaagccggcggtatcctgatgttttttgtcatcccggctgttttaactgtttatttcattgccattgctgtaggtgccaaaacaggcgcttcctgggcattggaaaaccagacgtatctgtacatgaacggatggttccactatgcgaagctctatgccgccctggctggatgtatcgggtttatgatgatcaaatacgaatggggaatcggaaaagctcactggtttaaagcctatccgtttgcgatcgttgctattaatattctgatcgctgttgcaagtgattttgaatctgccatcaatgggtggtattcgtggtggctgtcttcagaagatgtatggctgtatggtggatggcacaacgtgttcaacggaattgccggaattatcaatattttatgtatgaccggatggtgggcagtctacacttcaaaagacaaaaaagatatgatctggccggatatgatctgggtttacattctggtttatgatgtatggaactttgcttatacttacaactgtctcccaacacattcctggttctgcggagttgcacttctgcttgcaccaacaatcgcagccctgttctggaataagggtggctggatcatgaaccgtgccaataccctctgtatctggtgcatgttcgcacaggtattcccactgttccaggagactttctctgacggaacccaggtattcccatgggcaacactgccaaaattatatgctgacggtacgttaaacggcatcaccgcaggtggaaatacaaatgccgacccgactatgatgaccattgtcagtctcatcgcattgcttgtaaatatcattgcatttgtatatatcgtaagaactgcaagaaagaaaaaacgcaatccttacaaagaagaaatctttacagattttaaatactatcaggacgcagccgcaagagctgaaatcaaataagaacaaacaacgccccgcaaaaattggcttccatttttgcggggcgattcatcactctgtctttttttgttcttcctgaatctgctgcaccaatttacaatacacttcttcctctcgtaaatctgcaaatacttcttccgtctccagaatccacaacaggttttccaggaggtattcttttttctgtgaattactttccttccaatccagttgatcaaaataaatcgggatttccattttgtttcctttcgcaatctccatatatccgttgaccagcttttccaactccaaaagtgcttctgttctcttcccttccttgacccagataccaagcttcatctgggataccatgacattgacaccaccgagccgattttcctcaaacagagtttctaatgcctgcgctgcatccagaaattgaaatgcttttttgtattctctcttttctcctgcaatttttgccagactcaccagagaaagtcctgcatcccggatttcttcatataaacagcgctgagtcagcttttccgattcttctatccttcccatctgatacaaaatactggatttcatgcttcttgcgtcaaaatccggctgtggaagtttctcgaccgcttccagtcctttttcatattcctcattcatgcagtacagaccggacagaacataccatgctgtttctgcaacttttttctgttcactgacggtactctcttcaaacaactcaatactccgctccatctgctgcctcataatttcttcctcgcagctcgctcctgcatactgcatataagttgaagccacccggaatttcagaaacaaatccgtcggaaattcttttaagagttcttcgcagtactgctgcccttcttcccatttgcggctcgcaaacagcgtatctgcatgctccattcgtttcatacattcttcttctgtcatctgactctgaaaatccaacaggacatccacacttacgcccagaagccttgccagtggattcaaaagtgtaatatcggggtatgtcgtatctgtctcccactttgatactgctgccgctgaaatattgagtgcggctgctacttgttcctgcgtgagtcctttttgtcttctgaaatcctggattcgttttccaatttttaattccatccattgcacctctcttttctctgatcttctgctgtttttattgtatcaaaaaaaagaaaactctccaatggacggagagttaactttcactgtcggttttttaacgattggttattttataaaaacggtttcaattctttcattagctgttcatccatgtgcaccagcttttttgcaagagaacggctctcaaaagatgcttctttgtactcattgagaaactttccaatggactggatccccatattgcatccatccatcagaagcttggcaatctgggaactgtcatcgtggagcatcagtttcacatccgttgtaagtctggaaaacatggcagctgccgggttcggatccatttctttttctccggatttttcaagcgcacttccaatttcttcttccagctccttatgtttcttatcatattgatccagtaactgatgcagcttttcatcttttacaaaatccctcacctgattcaggctgttgatcgccattttgcagccgctgctacattcttttaacagtttttttgtctgttcatccataagatttcctcactttctatcaaaatcatgtattgcttattttttccgaaaatgaggattctatccatttatcttacaaccgcacctctgactttcggtgctatgatgcaagccattataattttcacaagatctccggggatatacggaaatacaccaaccccaagacctgccacaaatccaatgttcaactgcatcgaaagccagattgtcccaaaaatataacatacaatcgttccaagtaccattcccgccactgcgaatattaacttgcccttgaaatgctccacaaaaaatccggcaatccatgtcaaaaacagaaatccaatcagataaccacccgtcgggcctgccacttttgcagggcctccgctaaacccggagaaaaccggaagacctgccagtccaatgagaagatatacgatgtaactgatcgtactgaattttcttcccaatataaaaacagaaaaatacaataccagattggtaaatgaaatcggcaccggactaaacggaagcggtatgctaagcggacccaaaatacaagtcagtgctgtcatcaatgcaatcagtgtcatttgtttcgttgtcaaacattttgcttttgtttccataggttttgttctccttttacaatcttgtttcagtatacaaaacagggctcatattgtcaacctaatttgttatattagttaacaattgaggttacctataataacagttcccactgcacccattgggaaacagtctttcttgaatctgtttttggaactctgattctctctccacagtatccaaaattgcaaaagctttttttaattgtctgatatctctcagcatagattctgtatgatttcctcttccgactactttcagatgggtaaccccaatgtttctcaatttccaaagcgcacacaatccacacccgctcgctcctgtttgaccgttttccacatagaatccttcttctgtatgttcttttgtttgtaatttttgtaaacgtatctcccactcttttgatagatcctgtttgattcttccaagatgatacggcgtctgacagagatgtcccaattcatcacagtgcaaagagttacagaatgctccactgaaatgacactgttcattcaagacaaatgcttcatattcgaacggcttttttaaattggatatacaagatctgatatcttctactgtgtttttccgatgaaaaataatccgacaaatccccatttcttccagaaattctgccatctcactattaacctctccaaattccccactcaaatggatctgacatggaattttctgccgacggacgtacacaagcagcgccggatccgccacaatgatcgtatcaaacccggcctgacaacactgttctattattgttccgacaatcggatattgctccggcgtataagacaatgcattgaatgtaatcgcaaccggtacctcataatatgctttcatttttcctaaaatctgaagctcttcataagaaccgatctgaacattataggcacgtacttcccttctgttcaatggatttaaaatcccatatttttctgcccaggcaaagggtacatacccacagaaacattcatccgttcccgcctctgcaaacagcgggtaatcgtctgcactgccaagtcctgctgtcattttcatattcattccccttttctcacatcaaattgaccacgatccgatcaatcccctgtctgatatattgattcaagtagcccatctcctgcagagtctgtctgtcatatccaaacagagtattgtattttccaaacatctccagatgcctggggtacaaaaatgccaattctctgcagtacttagggcacttcttcacagcctcctgtcttccccgatctccatatacgaattttgcatataatgtacaaaactgtgctgtgttggtctgaaaaaatggtatatgaagactatgtctcccttcagggactgcaagctcgtgtccgcacgcttccagttcatacctctcaatctgatatttctttaggtactcctgataaaaatcactgttcaaattggtctttcgaaaacatgctgcttctgttttcagataacgacacctggtatcttttttcggacgccccagcaaaattcccagattgatcctgattttgttctgtgtctgttgtttccacctccacagcaaatgcagcagcccccagtcattgacaaccatttcatccggaaggcattctcctgtttgttccagacataccagacattcttttacatcctcaagctgtccttctttgatccagggaaatgtaagcgtcaccggaatacactcctttttcgccttttttaaaatagcctgcaaagactctcttggaggaaataaatgaggacagaacgcatttccaatatacaggcgatctactttccgggatgccagaggatacgactctagcccattcttcatccagtaggcttctacaaatttcccagttggtttctgaagccattcgtcatacaattgcggggtatccaattctactgccagttccactccttcttccagtttttgcccgtttgcagtcttggaagcttcgcaaaaccattctgctttctgttcttccagacagctggcatactcgtcatcctgttgaaccggatacccggtataccatgccgccacttctccatccgtttccgtcgttttcaaagatatatacttccagtaatcggaaagcagctgtcgtacacacttttgatattcttctgcttctgtcagtactgtatattctgtaaaaaacctctgtttttctgcttttttcacttgattgcccgaaatctcgattttcctgtaacaattctcactttctacataaaactgcagggaaatctcctgaattttatctactcgctctgccatacgaaaaacaaatccattttctccaagctctgtaatccgtacttcccgtccgtccacaattcccgcaagcaacccataaggaatcatagaaactgcctgttttatccgcatcttatctcctcctaaaccatcctgtcacatgtctgcacagtctgccttcccgataaatcctggctgtgccagcacaagatctaaaaatgctctcatctgaggcgtcatccatttatttttgtgatacaacagttgatgatacattttcacttgaggaagatctgtctgaatctcaaaaagcgtctcttgttctatctccctttttacagtaaactccggaagaaaggaaacacccatccccctctttaggagattaatgatcgtctctgtattcccaatttccaaaaccggtacaatttcgatttctttttctgcaagcatctgctcgagttcatagcggtaggccgcccctgtctcagtcaaaagaaaggcttcttttgccagctcctgtatcgggtatattccgcctttcggaatccgcaatttctctgctgtcacaaacagtatcttctccattctttccgctgtacacacccactgggaattataaatcttcttatccagtgtaaaaatcaaatcaatctcatcacttttcgccagatcgatcagattttccgttgctccggatttgatcactacctgcacttgcggatacattctgtgataggaaagtaataattccggaagcagcgccgtgcaggtagattctacccctccaattttcaatgtaccgcctgtaatatgctcttctcctgcaaaagtcaatgccttatttgtcacctgcataatctctctcgcatatgtaataaattcctgccctttctcggtcagatacacccgtttccccattcgttcaaacaatgggattcccagctctttttccaactgctgaatctggatcgtcaccgcagactgggaataccccagctgttctgccgccttggaaaaattctgagtgccagccacttttaaaaatgtcaaaatattcctgatctccatctgcttctccttattcatattttttatatattatataaaatctatgaatttcacatatatacgaatttagtgtagactatcctaagaattaagtcaatctttgaaaaagaaaggaatctctttatgatcggaactgaatatattttaaatagtacacaattagaaaatgccatcaaatcttttgtacacgatttttgtgcagaaaagcacgaaatccatgaacagcccgttcttgtggaagcaacagaccatcctgaagataagatcagacaacgtggaattccacaaaaaggacgcccggtagatgaagtggtctctgaaatgatgaatgaagtttatcgctaccggggagatgccaaccatccgcgcttcttcagctttgttcccggtcctgcctcttctgtttcctggctgggagatatcatgacatctgcttataacatccatgccggagggagcaaacttgcccctatggtgaactgtatcgaacaagaggttttaaaatggctggcaaaacaggtcggatttacagaaaatccaggcggcgtctttgtcagtggcggttctatggcaaacatcaccgctttaactgcagcccgcgacaacaaactgaccgatatcaatctgcaccttggaactgcctatatttctgatcaaacacacagttccgttgcaaaaggactgcgcatcatcggcatcacggataaccggattcgacggattcccaccaacagtcattttcaaatggatgtgaaaaaactggaagaagccattgaaactgacaaaacatccggctacatcccatttgtagtgatcggtactgccggaacgacaaacacaggcagcatagatccgttatccgaaatctctgtgctgtgtcaaaaatataacatgtggtttcacattgatggcgcttatggtgcttccgtactgttaagccccaaatacaaatctttgttaaaaggaaccgagcttgctgacagtatcagctgggatgctcacaaatggctgtttcagacatatggatgcgccatggttcttgtcaaagatatccggaatctattccacagcttccacgtgaatccggaatatttaaaggatctggaaaatgacatcgacaatgtcaacacctgggatatcgggatggaactgacacgaccggcccgtggcttgaaactctggctgaccttacaggtacttggaagtgatctgatcggctcagcgatcgaacacggttttcagcttgcagtctgggcggaggaggcattaaaaaccaaagcggactgggagatcatctctcctgcccagatggcaatggtgaatttccgctgcgccccaaaagatctgactccagaagaacaggatactctgaacgaaaaaatttcccaacgcatccttgcaagcggctatgcggcaatctttacaaccgttctcaacggaaaaaccgtacttcgaatctgtgccatccatccggaagccactcaggaagatatgcagcatacaattgaactgttggatcagtatggacgcgaaatttatgccgaaatgaaagagaattaactagaaaagccctggaaaacgcaagatttatcctgcttttccaaggctcttttttcacgatctcttcacaaagtattcttcataccacacaagaaatgtatagattgtccacacttttctccagttatctgaattgccaccaatataatcctcaaaaattgcgttgatttcatccagattaaagaatctggcagctatatcactgtgaaacttctcccgcacatcctgattgtagcgttcatctgccatccagatacggattggaacaatgaacccaagcttcttacggaatgcaatctcttccgggagcacttttgctgccgctgtacgaaatgccaccttgttctgctcctcgttgactttatagcgggacggcattctggacgcaatactgaagattcgggtatctgtcagaggcatacgcacttccaggcccgctgcccggctcatcttatctacattcagataaatatctccttccagccagatctgaatatccacgttggacattttactcagcggatccaacccttctgtctcctcgtatatacttcgcacaagctcaattggcagtacatccggatcataatgtctgagaattttctgcttttcctcttctttcataatattcgtattgcccacatagaaattcttcagattctctccatagcgctctgcattgcgatacatattgtaaccaccgaaaaattcatctgcaccttctccggaataacagatttttgtatgctttgcagtttcccggcatccaagcgcaaaggcaattgcagatgcatctcccagcggctgctccatattgtacatcacatacggaacaatgctgaaatactcttccggcgtaatcacacatctttgactctctcttccgagaatctctgctgtctgtcttgcaagtccagattcgtcaaacctttcttcctcgtatccacaggagtctgttttctgtacatcggacatcgccagtacataggaagagtctactccacctgacaagaacgattctgcatattcgctctcttctttcacctccggcataatctccgccagagtattatggatttcgtctgcccattcctccagtgttctgctctcatccggatgaaattccggtttccagtagcgggtgatcgtaagttttccatctttccagatcagatagcgtcccggaagcaactttttcacacctttaaaaaatgtcatctcgccggcaacatatgtcagacttaagtataactgcagcatctcctcatttaattcttttacaaatcccggctgctccatgatctgccggatggttgtcccatataataacctgccatctgcagtttcataataataaaacggctttgtaccaaactgatctctcagacagaacaactcttctttttcatcatcccacagcgcaaatgcaaacataccatgcatatgatctgccatttcacttccccatgtctcataagctttgatcaggatctgctcttctctttcctccctggataaagaatgatcgattccaagcctctcacaaagcgctgaccagtttcgaatgtgtccactgtattctttcacgtttatcatgtgtataccctcttttcttataaattcaataataagaatgcagaatcggcctgataccgattctgattttctggttctcgtttagtttaccacgatatgaacgattcagctatgcttttttctgaattgctgcacaagttcctgatcctgaatccaaaaagggacttgccaccaggcaaatcccttttttctaacgtcttgcatctttcataatctgcactgctgctgcaccatttcctgtcatcagtgcagaacttgcagcaaaatactctgcattatccaaaatgtaatttttaaaccgttctatccatgttgcttttttatttacctttgtattattcattgttactgtacggttgtttgaaatagctactgtactcatattgacctctcctttttatcatctatatcatatatcttctttgttttctttttacatatcctattttattcttgttttcatatggaaaccagtgctataattaacctgttttacaacgatattgacattttattcaaactataaaaggagtttttatggctaaagtttaccatgaagcattgcatccgcttggcaatcttggaatccaggtctctatggcagctctggaaaatccacatattcccgcccactggcatgaagcaatggaaattttattttgtttaaatggatccattaccatccatgtagaacaggaaattctctcgctctcccgaaatcaactgatcgtctttgactcgaaagaggtacattccattcattctgattcgaatttatatatgtttttgtgtatccatgtcgataaaaagcagctttccatttattgtccggattttgaattgtatcggatccgatgccgtcctataccacttgataaccccaaatccacacaatacatccatctgtgccagctggcccacagtatgacccgtacaaatgtaacaaacgaaagcaccagtgctatgcgttccgacggcacagctttactgatgcttgctgatttgattcgatatttttctgtatactccctcccggaaatgactgctgctcccgatccttctaatgatacgatccgggaaatcattacttacgtcaatgagcattacacggaaaaactttctctggatgatgtttctgcccgtgttggcttcagccgggaatacttctgccgtttttttaaacagcatatggggatcacctttctgcgctacttaaatgaagtccgtatttctcacgccggacgcctccttaccagtaccagtctttctatatctgaggtcatgaatgaaagtggttttacaaatcaaacccttttcaaccgactttttaaagaaatctacggtgcttctccacggcagatacgcagcagtgcagcgaaagaccattctttataatctttcgctgcaccatgcgtttttctttcttactcaaaatcaatcgattttcctgtacgtccggattcacgaaccgcatccataagttttaggatacgtcgtacttctgaaatttttaccagaaattcttcttcaccgtgatatgctctcacatagttttcaaaataatttctatgctctgtattcacttgtggaagtggttctgtaacaatccttccctctggtgccggtccaaaagatctggtcggtccggctgctgtcatggttctttttcctcctacatttgtcagcaaacttgttgtacggacaatcttgccttctgggaaaaaaccatccacatatgcggttcctttatttcctgctacaaaccaatgccgctcaaaccatttatcctgaaccttatcggccagataatatgtaccaagctctacggtagccgtcacatcattgtcaaaccggagcataatgtgaaaataatcgtctacttctgtattgatcacattgcggatatctgcaaatacagatttcaattttgctcctgggaacatccagcatacctgatccagaaggtgtacgccccagtcatacagcataccgcccccttcactgatcagtacatgccagtcatgcatatttccattgaatccgtacaactgatttttaatcgaatatacctttcctaacgtaccagaatcgtatacttcttttgcaatccgaaaatccggatcatatctgcgctgctgatggactgtaaatttcacgccgttttcttttactgccctttccatatcatccaactcttccaaactcatagcaaccggcttttcacagataatgtctttttttgcagctgctgcctgaagtaccagatcgtgatgctgattattattcgcggcaatgatgactacgtccacttctggatctgcaaacagttcttcattatccgcatatctcttaattccttcctttacgtcctcaagctgtttgggatctctgtctgaaattcccaccagcttgattcccggaaaatcactgagcattttttcatgctcatgccccataaatccatgccctatgatcgcaatacgaatatcttctgccattttttgctcctccatttttctttattccggtttgtattcatcaaaatcatactgaatcgtaccaaatggtgtttcctgttcacgaagtgcaattgattttgacatcgctttgatctcgtctgctgttacactgcgtccaagttcgctggaaagtaccacaccttcggaaaggaacgccgtctgcattgcaatatatggagaatcgattcttgttgtatcatccagttctcctcttaaataagagtaccactgcagctgattatcgttatatttttccatttccggatgcagcatcagctcctgctgtcctgtgatatcaccgatcgcacaatttaacttgttttcaaagaggttcccatcttcatcaactccaaaccactccagttttgggttctgaagcgcaccgcctcctacaatcgaaccgccttccggaacagccagaggacctcctgttgtatctacatctaaaaatttcaatccaccattcgaacctgcaataaagcttgttccgatatcatccatatgcattgcccagtcttcataaatgtccatggaaagtccgcctttaaatcttgcaagaccaacaccaagatcttctaccggtgcagtacggtttgtaatcttgtcaattcttttatctgtccaataatcacaggactgcataccatatacactttccagctccggcatgccaagtacgtaaagcatctgcgccagatgatagattccaagatcaaacagtggtccatgcacaccaacttttggattgatgaaatccggactgaaaaacggcatatcataaccgggacgtccctgacgtctgtgtccaacacttctcgcatgataaatcttacccagttttccttcttcgatcattttctttgcaatacgtgtctgcggattgtaaatggaactgatctgcactgccagtttcttgccgtattttttctgtgcatcatacaaaatttttgcatctgcatagcttgctgccattggtttttctgagtaacagtcaaaaccagctgccataaccgcagttgctacagaagtatggagattattatgtacacatacttctacttcatcaatgtcatctctttttaacatctcacgaaaatcctggtaaagattttcttccggaatcccatatttttttccgaatgcttccagtttttccttatcaatttctgctgctgctacaactttcagtgcctgtcctctttttttcaaattctcaataaccgtcatatgtctgtgtgagatcattcctgttccaattattgcaattctaatttctttcataattttcatatctccttttttctctattaaacgttgctgctgttaccatccaagaattttcaaatattcccggcttcttctcgcacactccagcggttccatatcatagtgttcatcctgctctacgatcacccattttgcatgtgcatcaattgccgcttccagaaccggctcccataccatttgtccaaagcctaccggacggaatccgaaatatccggtgtctccttcttcctcttctgtatcaatcccgatgagcttatacatatttttaacctcaccttttttgatataatctttcaaatgtacaacggggatgcgatctgtatacttatgaacaaattccggagcctctcctgttgccacatcacaccagcaagtgtcaagttctgacatcaaattgtcgtgaggaattgcatcaaacatcgtatcatatccccattggccatccgggagtttcacaaattcaaaatcatggttgtgatacaggaacgtcatcccggcatcatgaattttttgtcccacttcatttaacaatgggagaaatttttgaaatccttctggattcaccgggcgatattcctctgccatataaggcattaccagatatttcacaccgatcactgcatagtccttcaagatctgatccagattttccatcatttctgcaaacgccacatgtgcactgattggaaccaaacctacttcctctaaaacttgtttgacatactctggctctaaaccatacaaaccagccaattctactccgtcataccctaagtcttttacactttgcatcacacttttaaagttctcaggcgtatcctctaaaaggtctctcaatccataaacctgaattccaactggaagtttcttactcattttttgtcctcgctttctttccttgttttatgattctgttttattactcatctgtttctttctgactatatagtactgcttttgacctgaaaattattttcctcagtttcgcttttcttgaagttttttgcacaatattcccactctgagggggtctgtgcaacagatgagttctatttgttgcacaacattttaaaaaaaatcccgtctgatcatctcatcagacaggatttttcatcgtgcaaatcatgcactttatacaatcaaaagttttctttcattgacgtgatgcccgaattccggcataaataccatactctcctgatctggatcaagatgtgactggataatcggaggcatgtaagaagatgtaaaacaaaaaccatatttcagatcatgatatccctgtgccagtccgcctgctttttttactttcaaaactgccggtgttgttacagaccagtgtgtctggaaatcctgcgccatctcttcatttgtaaaatcttctccattgatattccatagaatctgatctttttctatcttctctccatcgatatagagcgtacccgggcgaatctgtgaaaggaaaattcctctgtaatacggcagacgcactttaaactgaaagcccgttacatttccctgttcatctttgatatttctgaatccaacggattgaattacctgtttttccataatgcaatatcctccttaatcccctaacaaatttttcagcataatatgctgttttctcagagtctgacctacttcgtagccttcatcgtacttatctgcgccttcatattcgctcagaagatagccttcatatccattttcctgtaaaactcggatgatttcctcataaggaatggtcgtttcctgaaaatcatcattcatgttgataaatttcgcatggcagcaataaacatatggcaggagcggtatgatatcctctggtttattcggtgtataatttggatccacccattccccttcctgaaactctgttctaaatacggaaaaatcaatatttaatccaaagtttttcgttcctgtctctttgataaaatccacaaaatcagtcactaattttcccttcagattggaaggggtatggatttccggacacatctgaattccaagctcttctgccagcggcagagctcctttgataatctctctccagttttctacaggctccagaaggtcattgatcacgggcattttggttctcatcacttggaatccgagtctgtgtgccagacgaatatcccgtttcaacatttctacagattcctctgttgtaagatcacggtcgcccaggacatgagagtcaatccagtttccatattctaccggaatgatttcatatttatcacagaggcgccaccatttttctacccactcatctgtcggatacgggtaattttcaatgtgtgtgtttgccagaatttcaattccatgagctcccatatcgtaaagatcttcaaagcagtcttctaaagtttttgtcaatccaaattctgcggaataactgtataatgcaactccacgctttggaccttttttttcatatttatacatgtttctacctcctgtttctatttacgcattgtgtttttctcttaattttgcacgaatttcctctgcatccttgtcactcattctccaaagcagacaggttgctgctgccaggaaaaacaaaattgcaggaagaagattgactgtgaagttgattccatttaaagcctctgctgtctgctgtgcatttgcaacatatccaaatgcactcatgatcaaaattccaaacgctccgcctactgcatttccaaattttgttgcaagaccataggttgcataagctgtaccatcggtacgtactcctgttttcaattccatgtaatctacagaatctgctaccatggacaaactcatcgggaatcccacgttaaacagaccaaagatgatgtcacctgccaataccattttcatattgtcaaacggagccatatacatgattacaagtccaattccctgaaggatcatggatcccatcagtacatttctcttaccaaatttctttgcaaaaaacggaacaaagaaagatccgatgattccccccagtgacgggattgtcataataagcgcgatcatggtaaaagatcccagacaatagatcacataataagacgtaattgcaattcttcccatgaaagcagtcatctgaagagccatgaccagtgtaatgatcatcagatatttattttttaccagattgtttactgtttctttaaatgaaaacggtttgggttctccaattggctgtaccacttcttttgatgtaaagaatactgtcaggaacattggaatggaaataatcgcataaaccaatgccaccatcatgtaaccgcgtccgtttgcgacttcggcgccagcgccggaaaacttcagtgctaatccggctgacactccatttacaattaccattccaagattcattccaatatttctggaggtattcaacacatttctctggtctgcatcctctgtcataaccgctgccattgctccatatggaatgtttaccagtgtatacaacatacctgcaataatgtaaataacggctgcccagatcacacctgctgtagattttccactgaatggatttgtaaatgtcaatacactgaaaattgcaagtagtggtgctccaaatgcaatatacggacgaaatcttccgaattttgaacgagttcgctctgcaatggctcccatcatcgggtcattgattgcatcccagatacgtgccagcatcatgatcgcagataccgcaaccggtgccagacctacaatatccgtatagtaaatcgtcagatatgaccccacataagtccatacaaactgagaagccagatctccaaatccgtaacatatggtggctgcccttgtcgcttttagcttcttctccattattttacctcttttccttttcacattttatctctttcgttttggatttcgtatcgtatcaacaaccggtctgttaattatccgataatcatatgttaccagacttcctacccttttttctcttcaaaatttctatatttctaaccattattttcaaacctgtccacaaaaaaaggcctatgcaacaactgtaattcatttgttgcataagccgcggcccattttcttttccaggataccgatcattgtctgcaaaagatatggatcagactgacttcatgtggttccagaactaccttcatatccaatgtatgatccccgcctgtcaccctcttcttactctgtgaaagcgtcggaaaactgattccctgaagatatttcacgtcttgtcttgtcagtttcatatcatactggaattttccccattcatttaaaatacttccattttgtctgttcaatgttcgtttctttaagtaataatcgccactttccttcaaattttcaaagtgaaaactcagatgaaccggactttcatcttcaaataccatagaattatatttccgcagatctacatcttcctcctgcaaaaagtaactccgtttaaaccaggaataataaaaacataaaatataaatatccccgctttcttttctggtaatgatataatgatcccccttctcgatcaaatattctcccagctgatttaaaaaatccacagcaaaatatgccggttttcgaatcgtatccttagacaaaaggccgattccaccgtttacaattcctactgtatccatatgactggatacccagtctgtcccactcataattcctatcatatcgacctgatctgcaattgcttcaatttttttcacgagatacgccgctcggaaacaactgtcattgagataattccgatttgaaatagtattattccactctgtaatatacacaggcacttcttccagttgtgtctgcctcagcaattttttaatttcacgaatctgattttcttcattgcattcatcctgagaaacttttcttaccggatgttccccctcacttcgataggaatcatatggaaacacaataaaagaaacaaaatccggtcttacatcttccaaacggcacatttctaaaaaactgaccagaaacttccagtctttttgcacaatgccgctgatccctccaaattttgcatcgggtattctgctctttgctgtatggtaaagataattccatgcgtgaaaaaagctgtactgttcatcctgatacaagcgattttccggattctgatccccatgaatgcaatcccgactcaattcaaaaatccatcctgacacttcctcctgcccatatcgatctacaatatgacagaaaaaatcatccaccatcttctcccagttttccctggaagcaaatggtatatactgttcttcataaaaaacttcttttccatcagaacgaagtgccgtatccggcctccttcccaaatccagaaatggtttcagccggtgctgtaccagaaaatccaacacctgattcacactgtcataattatactgcccgatcgtcttcccgtcatttaacatcatctttttcgaaaacacattccagatccgaaaatactgaaagtgaagatgctcattcagttgtaaggtgtggaattgtacatttgccttattgagatcccaaataggtcctatgttgatcatctgctcccatgatttatgatatttgtgcccctcacagtctttcatatcgatctgaaccaacgttgtctgcttctgctttccaagttcataccctttttgttttaattcctctcgaatttctgtttcctctttttctttggtatccccattttccatctcttgatttcgatatttttctctgtattctgtcggtgtcactcccatcaccttccgaaacgcccgattaaaagacgctgaattggaaaatcctgaggtcatagcgatctgtgtcatattttgttccgaatactttaaaagtcccagggccgttttcaccctcagctgcattacataatccgcaaaatagacacctgtatttttcttaaaaatacgggaaagtgttgatgtggatacaaacatcctgtctgccagttcattcagactgatctcctgatccagattcgccagcacatactgcatgatttcccgcattcgtgcatcattttctgtttcatatgtttcaatacttttctgattgatctgataattttccaccagacaatccaacaatttgagcatcagactatccagatagcagttcgtctgatgtgcccttgatgtatactccgctgtcagctgaaataatatgtctcgcagatcctgataagaatgtccatcatccactaccgaattacaataaaatatcatatgccggctttctaacactgccgtcgtcaagcgcatagagaaagaagctattccgtatagtgcatctcttgtatgatcgatttcataacccacacccggattgatcaaaataatatcttctgctttcatctgatatacttcatcctgatatcgcagtgccatcttcccctctaacagaaaaataagaagcaattctgtctgtatgttttcttctttcgatactgccttttgtacacaataattcatgccattaacatccattcttttttcagacctccctgttccattcatcgcttctccgaatcctctaattctattatcataccacaatatcccttcctaattccactgaaattcctgtgtaaaaagccggaggaattcatccttcggcctgatgtcaaaacaaatcctattctatttgaacggttcgcgtcatcgtcccctccaacggaaccggaatataagcagtgcgtgtacaaacagtaagcgtcacctgatgctccccttttccaagtcctccctttttcaaaactctgactgttccaggtactccatattcccattttatagaactaactgtctccatttctttttgtgtaaaccagtcaatgtggtctaccgtaaaacggatattctcttccgatacttcctcaccatccaccgatactttcaaataattaatcatggacagtggaattcccctgtaataagtaatatgtgtctgcagctcatatccaatgatttctccattttccactacatttctgcaggttcctggaataaatacattattatcaaacatttaaatttcctccttttcccccttcgatctcctgaatcaaacgctgaatcatcttttgatgcgcttctacttgttccagttccggaaccggctgatctgggagaacccatctgtttccttcgtattccgtagaaacatatccctcatatccatgagtatgaagatattgaagaatttctttataatcaatgctatactctgtccccctttctgtcatttcatacagtttaaaatgtacgtgttttatatccagtgaccgatcataatctgagtcatctttgtaaatggtgcaaaatatacgataaaaagtcctattccctgccccaaaagcgtgactgccaaaattttcttttttccgaatttatttgccaatggagccacaatcaacgaaccaataatccccccgatagaaggaattgtcataattaatgcaattagtgaaaatgctcccagacaataaatgacataatatgtagtaatcgaaatgcgccccataaaagctaccatctgaatcgtcgataccgcaaagattaccatcagatacttgttctttaccatacctcccagcgtttcttttaaatttaattttcttacttcctgttccggcatgattacttccttcgatgtaaaaaatacaatcagaaataacggaattgcaataattgaatacacaactgccgtcatcatatatccatgccctgtcgctacttctgctccatttccagaaaaataaagcgcaagacctgcagagcaggaattcacaataatcattccgatattcatacctacacttcgtgaaacaccaatcaagttacgttgttttgaatcttctgtcataacagctgccagtgatgaatacggaatattgaccagagtgtataacattcccgcaataatatacacaactgctgagaaaacaactcctccgataccatttcccatattgataaatgtcatcactgcaaatattgcaagaaacggacatccaaatgctatatatggacgaaaacgtccgaatttagaacgtgtattttctgcaattgcacccatcattggatcatttactgcatcccatattctggcaatcagcataattcccgatacgacaattggtgtaaagccaacaatatccgtataaaaaatagtcagatatgatcccacaaaagtccatacaaactgagatgcaaggtctccaagtccatagcatataattcccgttttggatgccttttttacgttaatatttgattccatctccttctccttttcacatattcctataaattttcctgcattctccggctctgcaaaaaatgaaaagcttttcttaaattagttttattttacttagatcttctttctttttccttacctttttttcattttcactccgctctattgcatccgcaaattgatatcgttaaaactgctggggctgtcgcactaaataattagtgcgcagcctcttttctatgcaaaaaattacagccaggcttcgaaaagcctggctgttggtgtaaaatataagtatgcaaacccctatattattacacaagaattatactttgaatgaggaaggatatcaactaaaacttcctttaaacttagaaacaattattccagtagatgattctgtgcggttgctgagtcagtttgtggaggctatggatttaacggacttatattctacttatgaaagaataaatacagtatcgccaagaacactcttgaagattgttttatattcctatatgaatggtgattattcctctcgctctatggaattgaactgtaagcgagatattaatttcatgtatcttttagagggaaaaccagttcctgaccatgccacttttgcccgtttccgaagtattcattttgctccgtgtgcgaaacgaattctcgctgaaatgtctaatctcctttacggacttggagaaatttcgggagaaacgatttttatagacggtacaaaaatcgaagcctgcgccaataaatatacatttgtatggaaaaagacggtaaccaaaaatcaggcgaagttgctgattaaaatcgccgatctcattgcagaatgtgagcaactttatggtattcggattgttcacggtgatactgttaaaatgaaacacgtaaaacggttacgcaaaaagctgtacgcattaaaacaagaagaaaacattgtatttgtacatggtattgggaaacgaaaaactcagctgcaaaagagtatcgaaacattagaagactatctggaccgtttaaaaggatatacaaaaaaactgcatatttgtggaaaaaggaacagttattctaaaaccgatccggatgccacctttatgcggatgaaagaagatgcaatgggaaatgggcagttaaagccagcatttaatttacagcatggagttgattctgaatacattgtatggctgacaatcggaccacagcccacagatactaccaccttaattcccttcttaaaggaaacagaagaatatctgacatttaagtatcaaaaaatcattgcagatgctggatatgaaagtgaagagaattatgtatttctagatcaaaatcagcagttggcatttatcaaaccatcgaattatgaaatatcaaaaaagagaaaatataaaaacgacatcggccgtatagaaaatatgaagtatgatgaaaaaagtgactcttatatttgtaaaaatgggaaacagctgccctttacacatctccgtcgctctaaatctaaaactggatatatcagtgaaaaaaacatttatcaatgtaaagaatgtaaagattgtccttacaagaaagagtgcatcaaggggaataactgtaaaacaccaatagaagagcgaaacaaagtgctttccgtagcaaaaacatttttgaaatatcgggaggaagatttggagcggattctttctgacgaaggaattcttcttagaataaatagaagcatccaagcagaaggatcttttggtgaactgaaacaggatatgcagtttcgcagatatttgagtcgtggcacagcgaatgttcttgctgaaagtgttttgctggcaatggcaaaaaatgtaaataaacttcataacaaaatccaaaaagggaaaactggaaggcatttatttcctttgaagagtgcataaatttagagaatccgaaatttttttcaaatccagttttggattgtattaaagtacggcttttttacgaaaaagctatcgtttcaatagaaacagagcaactatatagcgaaaatcagaaaaaaggaagctgccgcttcacgatttactaatcgttaaagcgacagccccacttttttctgatacttctgacaaacgaatatctgagtcagccatttcttgtcattctactttccatttttgtgacgaagaatccttatagcgaatattttctatagaattctggataaaactccagaaactcctggaaaagaaacttgtaaatttagaatagctacattataataaaaatattaggataaacattaggaggaaacatttgtgaaaaacgaattagtaatcgtactcgattttggcggacagtacaatcagctggttgcaagacgcgttcgagaatgcaatgtgtattgtgagatttattcttacaaaacagaccttcagaagatcaaggatatgaatccaaaaggaatcattctgacaggtggtccgaacagttgctatgaggcagactctccgacttatacaaaagaattatttgaacttggtatcccagtacttggattgtgctatggcgcacagttgatgatgcatgtacttggtggagaagtaaaacgtgcagatgtcagagaatatggaaaaacagaagttctgatcgataagccagcttccaaagtatttgagggagtatcctctcctaccatctgctggatgagccattttgattatattgcacagatcgcacccggctttgaaattaccgcacatactgcagactgtccggttgcagcagcagaaaatgcagaacaacagttgtatgccattcagttccatccggaagtacttcatacagtacagggaaaagaaatgcttggtaactttgtaagaaatgtctgcggctgttccggcgattggaagatggacgaatttgtagagaattccatcaaagaaatccaggcaaaagtaggtgacggaaaagtattatgtgccctttctggcggtgtggactcttctgttgcagcggttatgctttccaaagcaatcggaaatcagcttacttgtgtctttgtagaccatggactccttcgtaaaaatgaaggggatgaagtagaagcagtctttggaccagaaggtgactatgatctgaactttatccgggtgaatgcacagcagagattctatgaaaagcttgctggtgtctctgaaccagaacagaaaagaaaaatcattggagaagaatttatccgcgtatttgaagaagaggcgaaaaaaatcggaactgtcgatttcctggtacagggaacgatttatccagatgttgtagaaagtggtctcggtggtgaatctgcagtgatcaaatcccaccacaatgtaggaggactcccggattatgtagatttcaaagaaatcattgagccgcttcgtgatctgttcaaagatgaagtaagaaaagccggtctggaacttggtcttccagagcgtttggtatttagacagcctttccctggaccgggactgggaatccgcattatcggagaagtcactgaagaaaaagtaaaaattgttcaggatgcagatgctatttaccgcgaggaaatggatgcagcaggtatgaacaagactgttggacagtattttgcagcactgaccaatatgagaagtgttggagttatgggtgacgaaagaacctatgattatgcagtagcacttcgtgctgtaaatacaattgatttcatgactgcagaatcagcagagatcccatgggaagttctgcataaggtaacaagcagaattgtcaatgaagtaaatcatgtaaatcgagtcgtgtatgatctgacgggaaaaccacctggaacaatagagtttgaataaaatgaaacgccgtaaaaacccagtgttcatgcgggtttgcggcgttcggagaagccttttgataacaatttgataacagccatataagagccattattcttgcagcccagtggtttacgggttacagaatgataaaaggcggcttgcatggcggaagaaatccatatagataagcccttagctgtgggtaatgattccatagctaagggctttttgtcgtttttataaggttgccatagtggaaattatagcattttttgtaaatataccatatctataagctgctttccacactcaaaaattgggtgatcatagttatcgataaagaaattctttacgacataagagcgaataaagccgcatttttcatagaaaggaatggttaatggactatcacctgttccgacttgtagcaccgaatattgctcagagtatttcgcaacaagaaaatcaataagttttcgggcataaccctgtttttgatagtcaggcaaaggagagattgcaaatgtcagctaagaacagggataacaaaaaccgatggagaaacatcacagtaggatttcgggtatcccccgaagaaaatgaacgcatcaacaaggcggttgccttatcggggctgcccaaacaggaatactgttaccgccgctgtctgaatcaggatatagtggtacaggggaatccgagagcgtataaggcactcaaactggaacttgccgctgtccttacagagttaaagcggattgaagcagggaacagagtggatgaggaactgttgaatgtaattgaactaatcgccattattcttggcggtctgaaaggagaggatgagaatggagaataaaaaagaaaagactgccccgaatgtatctgttggcgcagatacgggacagccaattcaaaaaatcgctgaaaatagtatatctgagtatgagaaaaatatcaagagttttgaggaaatgcaaagagaaatgcagttgagtttagacccctcctatctcaaagcagtttccatgaatgaactgtttgacacccagtatcagagcaagccgccgctaatcgacggtctgctctaccccggcacatatatttttgcaggttctcccaaactgggaaagagttttctgatggcacagcttgcctatcacgtcagcacaggaacaccgctttggaattataccacccgaaaaggaacggtactgtatcttgcccttgaggatgattaccgccgtttacaggaacgtctgtatcggatgtttggaacagagagtgcggacaatcttttcttttctgtttctgccagtcagctagggaaagggctggatgaacagcttgcaaggtttgtggcagagcatacagacacgaaactgattatcattgatacacttcaaaaggtgcgtgaggttggtggagataattacagctatgcaaatgattatcagattatggcaaggctgaaaagctttgcagacgcccacggtctttgtatcctgctcgtacaccacacaaggaaacagacggcggatgataagtttgatatgatttcgggaacaagcggactgcttggtgcggcagacggagcatttctccttcagaaagaaaaacggacaggcaatgcagcaactttggaagtatcgggcagagatcagcaagaccaaaagctatatcttatccgcaatacagaaacgctattgtgggaactgcaaagggcagaaactgaactgtggaaggaaccgccagagcctttactggatgagattgccgaacttgttatgaaggatatttcttcttgggaaggctcggcaacggaactggtttcgctgataaaggtagaaattcagccccatgtcatcacacgaaaactgaatgttctttcagggaggttgtatgcggaacatggcatttattataagaacaaccgtacccatgatggaagaaaaatacggttttggaaagacgatacggaaacagcgtgacagttggtgacggttgtgacggtatttttgatagcgggggtggtattgaaataaccgtcacaactgtcacataccgtcacggaaaggatgggatacgatgagaaacgtgcaaatatcacaggaattatttatgcagctgctccgttttcacttgatggaagatgaaatctgtgagagagaaatcaagcaggagttggagaaaaagttggacaggatggtcatgcgtgacctgtttggaaaatcaaaaactgcaccgacaaaggaagaacgggaacaggcaagaaaagaatatctggacaggcgaggagtgtcggagagtttccgctggtaattcttctttgatgataaggacaggggtgtgccacacccctgtgaataacagacaaagacaggaagtccaaccaaaacttcctgtctcatatatcagattatcatatgtaataaaattgtaaatattaccattcctattactgcaaatgggaatgtcgcaccatatcctgttgccgcatcatccgaatcaagaacttctagcagcgttcccatgccagttgtatttgtcatacctccacaaattgctcctgaaagcaatacatagttcagcttcataacatatcttccaacaatgaagcctgacatcaacgccactgttgcagtaataacagacacaactgcaaatatccaacctgatccagtaattgcatttacaacattatatccgtaacgtaatcctacaattgccaggaaaatttccaaacacagatttcttattacctggagtactttatcgtccatacggaaatttataaattttatttttccaatcgcgccaaataataagcctcccagcaaagctccgcctgtgcttccaagactgaaacttcctatagtaacattcccaataattaatcctaccagtgctgcaactgaaaatccagtaacatcaaacaaaaccgatttctttttagaggtatctacatcatgataaattatttttgcgaactcttctttttctttctttaggtcaatcttgaaaatcaaatgtaagaaggacatagcgataataacaaccagagaaccaaacgggaatgcaatagaatgtccagttccaacatctgacaaagctgcatttacaaaatccttcttctcttgttcagtgagactttctgtttcatgagaaatattcttttcgatattttgagtctcataatactcatttagtacctttgcaatttcatctttcttactatcagaatattccccaaaattttcggcctgctctttggcctctcgttctgtcgattcaagtgcagctgctaatcctggagaacttgtcatcgctcctgagtatacgccacttactttataaaaactcacattagaagagagaacttcagtaagtccgaaattcacggctgctccaataaaagtaattaaaaaaccaagaataataaattttataccgtatttcttaattactacacctatactgttggaagctaaaaggccaatagcagtaacaaacagtactagaaatgtatcaaaaagcaaactgttaattaccccgttggaaataaattcctgtgcatcactatatattgaagattcttctcctatactttttgcatattttaatacaaaatatccaattatcagacctacaaaaagcgggcctgctcccccaaatgaaaaacttttaatcttaattcttccaaacaacattcctaaaaatattgcggcaaaaattagaacaaacggggaaaatacaacacttgcaaaaaaagtttccatgctgccgttcctcctttgatagtttagattacatttgcttttctgagtttttcgtcaatatcaggtttatcatatttaccattctgaatatctattattctttgagcttcataagctagctttttatctgtattttcaataattccttctacctgatccggagggattactacaactccattttgatcacctacaacataatctcctggcattacgggtactccgccacaacatattggataatttatttctcctggaccagatttatctccaacagctggcgttacaaatcttgcaaacacaggataacctttttctctcaattcttcaatatcacgtacaccaccgtcaattataattcctgctattttttttgcaacaagagtggtcgccatcaggtcacccataatactgtagtttctgcatccacaagtatctacaacgatcacatcaccttctctggccattgaaatagctttgtgtagcattagattatctgcaggtctgagccttacagtcattgccgggcctgcaattttaatatctcttctaatcggctttatttccggatccacagtattaaatttattcaaaccatcgctaagtggcggggtactgtactgttttaatttttcaataatttcttttttaggtctttcaaaatctggccctattctaaatccaaattttcctttttccattggttttctcctttattaaattaattcctctgcaacaactggataaaaattagcaaaactttccgcatatttatagctttgatttccagagattcttctggcatgatttcctctcataaatgctctttgtgtgtaatattcaatcagatggctttgcccctggaaacaattcatagccgctacttttttgtcatatacactagtaatatcaataaattcatctggtttataattactaatttctgtctgatgtggctcaaatccgaataatctcatttgttttgttgtcggataaccttcagtaattactccactggaatttgacataatactgcatctccataccaagtcgtgaattgcattatggtccggatttagcacatctgatttatcatgagtaagaatgatatcgggctgaacttttcgtatagtcttaactatacgttcctccaactcttctgtaattctgattggataatcttcgagattccaacattcaaaatttttaattccaagtgtttcagctgcttttcttgtctcattttcacggattttagctacgtcatcatatgtaacatttccttgtttccagattccatttgattcgccgcgaactccaaacgacagcacaacgacagtaacgtctgctccttcttggatatattttgctattgttccaccgcttctccaaacataatctgctgcatgtgcactgattactaacattttctttcctttaatcattttctattcctcacctttcttttctattttccaagaagttttctaggattatcacgaaccatctttctgacgtcatcttctgacattcctctttcaaccagtttgcaggcaaattccagcaagccttcatccggatatgtagcagttttctgtcctaaatctgtagaaaggatcacatgatccgctccaatttcgctaatttgtttgtatgtctcttcgaaatctactttaccggttgcaaatgtggtatagcaatgctccatatatgctccgtactgtaacagttctttttgttcttcaactgtatagaaagttgtcggaaaatcaacatgtgtaataacaatatttttcacatttctttcataagcagcttttacaagagcgaatgtttcatcatgagatacatgtccggtagcaagaatcatattatattttgcaatgatatctagaatatccagaacttcctgtctcagttttccttctttgtccaaaatggttattacaggactttcaattccttcatctttcatctgaataagtatttttgcccaataaggaagtttcttattaggatctccattaaagacatgtgtacgttcatgttcactatcacacgtaggaaaccaaaccagtttagctccacttcttccagccatttccaccgctgtcggattcattcctcctacagaactatttaaggtaattgttcctactgcatcacattttgaatacattttattgattaattctgccctttcacttgtacaaaaatagtggcttttaattgcatacccacccatcttagcatccgtgatacgttgtgccatctcaatatcatccatttttcttggcaacacatctggtgcagaatgtacatgtagatcgtatgcaccttcaatcaaatactctttcattttcatttctccttttctttttaatcttagtttttttattgttgaatttaaatactactctttttgttgtaccttattgttcaacaatcttgttattcaaataatacatcttagctatataaatgtcaatgttgtttattaattttgtttattatttacattttcattcaagatttttatttaatttcaccaattaaaatattgtttttctatattgttgaacatatttgtatgcagtaattgactttttttgtataacaaattagtattaaagaaagaactatcgaatataaaccaaattctaattatatatggaggaaaaaatatggccgctaatgctacaaatcgcatttatacaaccattaaacaaaaaatattaaatggagagtattcaccttctgaagctcttattgaatcagaattggcaaatgaatttaacgtaagccgtaatacaataaaaaaagccttattgatgttagaaaatgaatatttagttgttacagaaccgaatcgtagcgcaaaggttcgttcatattcgctgaatgaagtgttggaatttttggaagttagaactatcttagaatcttatattgcaaaaattactacacccgtaatttctgaaagtgctattgagaatcttaattattttttaacacagatgaaagtcaaaaaggaagagcaggatttaatggggtattcatctttaaatcaaaaatttcatgctcaaatttatgaagcttgccctaatcgaactttgattaacacaacccaacaattaaaaagtcaaatgagaaaatataattctaaaactatactaatccctcatagagatgaagattcttttaaagaacatacaaatatctataatgctatcaaaactcgaaatgcagatgctgctgaaaaatatatggctacccacattcagaatgttagaaagacattccaagaatattaccatatacttttttaactgataactattgaaaaaatatatgtatatatacctttattccatcgcatagaaaatactatcctcaatattaatttaatctcaaaaagtgtcacccaaaatcaagtcacattttttagaaacaatgattacatttacatattaactgtatatatttgattcctttcaccataggaatcagtaacagcagaatcacaacagcaatggtgccacagacaatgctcagattgaaaaatactttgatattgttctgcgtgcttttcctagcaattaatatatgatagtggaacctgttgaggaacatcatgtaggtgtttatgctagtaaagacaatcagatcatcgtaaaaggtgacagaccaaagagtctgcttaaaaacagtatcgttacaccatcacttgctgtaagtatcatgaatgctaaatttaccaatggactgcctatttacaggatcagtcaggaattccagagaaatgacattcatatttcccgacaggtaatggctaactggatgatccagttagcagacggatacctggggattgtttatgatcgtcttcatgaacaactgcttggttatcatgtacttaaagcggatgaattatgtgaagctctacataattcatcttatgaaaagtattatgttatgtaaaggacataatgatgtgttcataattatacctctggaaaaatgatatcagtctgtgcctgcgtgtagtgaagaacatttataaaatttttgaatcatgtctacaagagagaggttttctgtagcgctgtccccgagaatgtgaaactttttctgtaaataatgttatggaaggtcttctatgataaaataaattatcataaggaggccttttactagggcaagagaaaaaaactatacacagagtacaaatgacggaaggaaaacgcaacatcgtaaacgtcaaaccatacgcctaacgtcaaaataaacggggctgttgcaaaatagatgagtaatcatctatggagcaatagctccctttttatgcctaaaagtagaaaacggactccgaagagtccgcaatccatggtataattaagtatgacaaaatacataaaataccataaaaattataccgaatttggcgagccttatcaactggttttgccattaaatttggaaggtctggttcctgatgatgattctgtccgactgctgagccacgaattggaggaattggattacagcttgctgtatcaggcttactctgccaaaggcagaaatccggcagtggaccctaagaccatgttcaagattctgacctatgcgtattcccagaacatttattcatccagaaaaattgaaacagcatgcaaacgtgatatcaactttatgtggctgcttgccggacaaaaagcaccggatcacagcacgattgcacgcttccgtacgggattcctggcagatgcctgtgaagatctcttttatcagatgataaaacagctggaaaaagccggtgaattgtcaaaggagactgtttttatcgatggcacaaaactggaagcatgcgcgaacaaatatacttttgtctggaaaaaatcagtgggaaaatgggaaacaaaaatgttccgcaaaatacaggaagccgtattgcttctgaatcaggagtatatgcaaaggttttacgtgacagaagatacaaggatacagaatcttcaggagatctgccgtttcctggaacgccaaactatctatgactggcatacagccagcttccagggacggaataattattgcaagacagatcctgatgctacgtttatgcatatgaaggatgatcatatgcgaaacgcccagctgaaaccgggatataatgtacagattgcagtggacagcgaatatcttgtggcaacggatatttttcaggatcggaatgatgtatggacactggttccgtttttaaaaggaatggagaaaaaactgggtttccgatatccaagtgtgactgcggattctggatatgaaagtgaagaaggatatacctatttacgggaacaggaacaaaagccttatatcaaaccccagacctatgagaaatggaaaaagcggagttttaaaaaagatatcagtaaacgggaaaacatgggctataatcttaataagctacactcaaaaatacagaaagagcggacagggacgcatctgttcgagataaaagaaactgcataaaacaaagaaaaggcaaaggcctttattaaagtatgccaaaaatccagacaaaatccccaagcaggaagattctgtctggatttttcacaacatggagcgagggcatcgctccatcatctaatcagatgattttgcgacaccctcttttggaattctctcccttgttttgcttagtttggggaatttggattcagatttttatccgaatatcatatctaggagggctgccgtcaggcagcgtagcgggagatttcctttttcagttcttcgcaatgatcaccataaacctgcagtgatattacgttgttcagcccgagattcatgattcctaaaatagatttcgcatctactacaaatcttcctctcttcatatccatatcaaatggatattttgctactgtatttacaaaatttagaatttcctctgggttcttaaaactaattaacatttcactcatcatgaatactcctcttctgtgatatgctgatgtcttcctatgatgccttccatgtttcacccttacgagattaccatattttcccaaaacaaacaggatgaaatatctaaaaaagggagagttttttaatgaaccgactttctaaagtcatttggaagcatccccacttcctctttaaaaaccttgctcatatatttcggatctgaatatccggctaactctgcaatctgattgagttttaaatgcgtgtttaaaagaagctcttttactttttcgattctgtatttacggatagtctctgtaaaggtactgcctgtttcttttttaaactgtgcacttaaatattcttctgacacataaagtctgtttgcaatttcctctaaggtaattccctgatcataatatttacgaatcaactttttcgcctgcttgaccaagacactgatttcttcactctctttttctgtttcaaattcaaaaagtcgaaagaatgttttcagtgccgtttccaactgttcccaacttacagcaatcgtaatttcctgcataatattctgcactgccaggtccagttctaccgacacttttgctttatacactccaaatacaaataagctgaactgaataatcgcctgcttaatatctgccggcatatgaaattcttctttatagcaatttcccaacttccagaaacatttttttaattcgtccttgttttcctgtaaaattgcctgttttgccttttcttccaattctattggatatttgatcggtactggatgttgctgttgaatcaactcattgcagatcaatgtccctttcagaaacatcaaattccattctctctgcgtacgaacttcttgtaatgcggccggcatatccaacaactgatctaaagatttccaaaaaaagatgatcggctctcctaactgactgaccaacatcggaactaccgacttttcaaatcgctctttctgggattcaccatttttcgcctgatagatcaccattgtcagaagctgccagctgtctgattctaaaatacaggatttataacaaatcgtatgctctcccaccgcttccaaaagctgctttgccagatttttttgttgaacatagtctcttcccagccatacacagaacagttctgccgaatccttcagtgaaatcccatatttttgctgtatacttttatccaactgagaattctggagcatctgaccatgcatacatgctaatatgatacttttcacagaaaaaatttgctctgtatcctgatcttccgaaatttccaaagcggccttctttaaagcattttttaattctggaattttgatgggttttaataaatagctgtctgcctttagttcaatggccttctgtgcatattgaaaatccgaatatgcagaaagtataataactttacattctatctgttcttctcgcagcttcttcatcatagcaagaccatccatcttcggcattcggatgtccataatgaccaaatccggattctgttcccgaatcaactgatagcctgcttccccgtctgccgcttttccaaccaattcatattctggatccagtctgctcaaaatctttgccaggccttcacggattggcgcctcatcctcgactactacgatacgcatgtagtttcctcctctaccggtataaataaatgtactttcgtataattcccaacctcactctcaaaatacagcgttgcctgtcctccataatacaattttaatcgttttcttacattcgcaattcccaaatgcccttccatcacaccttcttcctgattcagcttttctaccagctccggctctattccatgtccattatcctggattaaaatatgtatctgttccccgcttttctttatgcggatatttaacatacactctttttccttttctgtaaatgcatatttgatcgtattttctacaaagggctgtaacagcaatttatgaatctgacatgatttcacatcttctgctaaatagattttcacatccagacgtctcccgaattttgcactctgaagcataatatattgtcgcagccatgcaatttcttcacaaatactcgctgttcctcctgcatttttaactgtataccgaagaatatctgcaagtgcaccaaccattccactgatctcatactgctcattctcaatcgctttccagttgatcgtatcaagagtattatagagaaaatgtggatcgatctgcgcctccagcgctgataattctgcattcttctgatccagaactgcctgtttcaccttcatgatcaacaattccaagtgcccaatcatttcattaaatcctgcactgatctgttgtatttccattggaaggtgggaatccacctgcacctgatatccaaaatctccgtcttctacccgattcatcaccctcataatagattctactgcatggatatatggtctactgaaaatacgaagcagcaaaaatataatcacacttgttacactgatcgtcataaaaagatagccccattgactgacagccatctttcgataatatgcaagtggctgttcattgcagattgaaaatccactgtctccgttctttactgttgtataacgataatttttcttatcttgtatctcatcaaattttctgcctattttctctggatccggagcactcacaattacatccccactcagcagatattctctggaaccgatatcagaagcaattgcccgtcgaacccgctcttccttcacactgaatacaacggttccctgaaaattttccagaaccctataatctgcaatattccttgcaatgtagaacacataatgctccttgccattgacccagatcggcttaccatccccaaaatatactgttccccgctctatttcaggcaccggaactttatccgcccaagtctcttttgcagaaaatgaagaaagactttcataatatattatttttcccgtttttaactgaattgtaattccttcaattcctgtatactgattacaaatatgactcaatttctttttgagttccatactactggtttccagattccctgcgccttcattcaatacccttatatctttcagaacagtctcatctgtgctgaaatcatataggattgtctcatacttatccagaaccatttccagatttttctcagcattggtcagattactctctatcctgtcagacaaattttccttcagccctctctggatattaatctgagaaacacttgcaaagatcaaaaccggaatcaaggctgttaaaagaaaatttgtcatcagccgccgcttcaaagtactccttcgtccacatttttcttgtctcaaaccacttctcctgtaccttaattgttcttctcatttcctgttcctactgattattttttcattataacataggcgtgttcttccgtcagccctcgttcttttcatgctgatgcaaatacttctcttttgtagccaatccaccgcgtatatgacgctccgatttgttcatatccaacacttttcttgctttagctgccatcatcggacgaatctggatcaaacgttccgttacatctttatgtttggtcgttactatttagagctgttttattttcacattcgtcttccactaaaatgctttcatttaatcccaaatctcccaataatcgaaggtaaatatccacatttccatctttgtctacttcgattttcttaatcagtctctttaactgtacattggtcatctcatgaacatccgtaatatcctcaatctgcttaaaggtatcatttaagattttttccatctgatctccttttgtcaaattgctggataccattttcaattcattttccagacgatccagttcttggcgagtaccacccaacttatcattcaattcttctcttgaaatcaaatcatcggtatacatatccatatatttctgtcgcattctctgtaatctagcaatctgcaaattcaattccttctcgtactctgcattttcatcttttgctttgtatactctttggaattctttcacaacatagtcaatcactttatttttttgctgaagaacacgatgaaaatattcctgtaaaacctgaatcaattcttcttcatctacaacggttttattcgggcagctatctgctccttttccatttcttccagaacaaacccaacgcacatacgtatttttgtaagtacgaactgttcttcgaaaagaccagccacattctttacatttaatcaaggtagaaaacagatacttattgctttgcctctcatgattcagattgaatgcatcgttccttccacgaagaatttcctgtgctttttcaaacacctcatcttcaatcatacgaagttctggacgttccacaacaagccattccgtttcatccttctctcttctctgaccagtcagaaaatcactaatttcctgctttccattgataatctttcccgtataaatctcattggtcaaaatccggcagatagcattctggctccatttgcagtttctctttgtccgataccctttttcattcagcatattggaaatctttgcagcaccgtaaccttcttctgtgtaccacttataaatttgctttacaacctttgactcttctttattgatctcaagattgaaataatccccgattgttttatcatatccgtatacaatgttaggaactcgtcctttttctgcgtttagtttctttccaaatttcactcgtttagatgtattcgcactttcctcctgagccaatgctccaaagattgtaagaacaaactcgctgtttcccatgcttgtcatatttgctgtcaggaactgtgtttcaattcctaatgctttcaatttacgaacattctgtaaaagatctacggtatttctggcaaagcgagaaatatcctttacaacaaccatatcaaacattcctttttccgcatcagacatcatatggagaaattccttacggttcttgattttcgttccggaaatgccttcatctgcatataatcttactaagacatctccggtacgctgagtgtattcagagaaaaattccttttgtgcctctaagctgttgagctgatcggctttatctgtggaaacacggcaatatgctgctatcttcatagtgttacctctctgtattaaatttattttctgttacatctatattatatatcaaaataaagattcgtaaacagaaaaacaagatattactgatgaaatcaataataccacttttttttaaatgtacgcaaattacgcattttgtttcctttctgaaaatcactcaacttatcccacaacaactctcgtatttctttctttttcgtattgcttcgaatattcaacaattaaatctttgtaatacttgttatgcatctttccactattttaagtgcccgtaacttgtccacatactcttttgcatcggcaatcccttctgcacaattccaactgttatatataaaacaaaggcgaaaagctgatttcattccagttttccgcctatcattatcatagaagatcttatttacagacttttcttcatagtctctttcttgacataggaccattttgattcatcgtaaatatccttaattttagcttttacggcttcacatctttttctgtattagaaggaacacgttttagccatgcatgataaccagaacgagaaacgccaagatgtttcaacattccggagacagaaacccggcgttttgccttatggtcagtttctgccttctccgtaacttcgagataaatggcttctgtcattttcccagaatgttgattgctttttttaatacttcaagagcatcctgtgcatctcgtaattctcgttttaatcttgcaatttcttttgcttcatcaggagcatagttaccggaactgccgctttcaatatcactggtttcacgcagttctttctgccagcgtgataatgtatgctgactgattcctaaatttgtagcacagccctgcagtcctaagttcctatgatcatgatagtactgaactacatccagcttaaattgtttgtcatagtgctttgtcataatgagagcctccttcagtgtggtacctacattgtgccacgaattttctaataaggaattctcattttgacttgtactatttatattctaacaccaacttctttctcttgcgcttggtactcccgtacatatttcaactcacagcctcataaagaggctgacttcatccatagaacactttttggctgcagtaatatttcaactcacagcctcataaagaggctgacggatcgagactgtgtagaagcatttttccggaaatttcaactcacagcctcataaagaggctgacgtatttttgcaaagatatgaggtgtagacatgggatttcaactcacagcctcataaagaggctgacgtgctatactacctgccagtagaaaatctggacgtatttcaactcacagcctcataaagaggctgacatttctggatccagaatttgttgacaaactctgcatttcaactcacagcctcataaagaggctgacaatacaaagcgctggaaatattggaaatgttaatatttcaactcacagcctcataaagaggctgacaagaacggtaagaagatttgggagaatgatattgtatttcaactcacagcctcataaagaggctgacctcaaactcttcttttgacagattccccttgtatatttcaactcacagcctcataaagaggctgaccgcatccattcatgtcacggtatgtttttgtatcatttcaactcacagcctcataaagaggctgacgtctttccatacgctgcctgtatgcatcatcaatatttcaactcacagcctcataaagaggctgaccgcaaaatcacacaatttcatgtgagataatgacaataattttattcaaccttaacaaactattgaatttatatatttatttaattctttttatatttgttttttcaattaagataaactaattttaggtgcgaatctcccgctaatctatgtatactttgtattcgcactgacatagcaactgaaccgctatatacatttcaatttttaaaggcatctcatttcactaatttagaaaatcagtgtttctgttacatcgtaactctcttttgcgccaatatgatcaaccttatttttatattgatttcctaagttataaaagcgcaaactatctttttctttatcaatgatagattccaaaacagctttaatctgacggtatttcgtagaatcgacctgacattcaaaaacagaattctgaactcgctgcccataattcacacattcttttgccacttttcttaatctctttctcccatctggcgtctgcgtgttaacatcataagtaattaaaatcaacatagttatcacctacttccagaaaaacggaggatattcatccaaatctcctcgtaaatatcttgccaacaacattgcctgcacatatggaaccatcccccattccactttttcattcaaaaatggatgcttaattacttcctgttttctctcctgccacgcgtttagaaatatttttcttccactatcatttaagataaccgcaccattttctttttttataaaatgtgtctctctcatgattcttttattaatcagcgttaagacaaatctatctgccattacacctcttaattcttccatcatatccaatgccaatgacattcgtcccggcctgtctgtgtggtaaaagccaacataagcatctaatcctaccccttccaatgcagaaccacacatacctgccaataaactataagaaaaagaaagcattgcatttacattatctaaaggcggccttttatttcttccacgaaaataaaaaaactctttttgttgtagaattaattcatcaaatacggaaaaatatacggacgccgactctccttctaaccctaaaagcattgaactattttgacaattccttattttgccaagattttgcttcaaaaattcagattttttctttatcttttccacatcaactcttaaagaataatctcttgccgcccgttccaagatccatctggaattgtaaacttttccaataataaaattgcgtgcaagctttatactttcttcctcattttcactaatcctatattgttgttttcttaatgtaacattcccattaacttctcctgttactctcgccagaaaacgaccgttagcagacataaatgtcagttctatatttctttctgcacatgctcccatcaatgccggacttgctcccgtatatccgaatgtcacaattccttgaatattatgtaatggaactctgccgatttcttcctgtctttcagaaacaacaacattttcaccatctaaggacaaatatctgttttttccgattacatacaatatatttagcaatttcttcatgggattccctcttcttctctaattttcctctcgatatacccggcagcagatttatttttatttagtgcagggacacatacatcttttaaagaacatgcattacaccttttactccacttcattttaggcgtatatctctgctcataatatttatgcatttccttaaacattccttttactttttctttcaaagcaatggtaaaatctatcttttctctatgtctagtttccccataataaatatatccatatgagatttcacaacacaacatttcttccaaacacatactctgtgctataagttgtactgcatctatatcatctgcttttggtattcctttcttatattctattggcacaaccttatattttccctctattccagaaagggaaattccttcttctgctttatgaaattccacaacatcacattctccgctgactcccagttctctggaatgaactggcaatgctctggtaataatcagttcaccccgcttttccttgatagaagaatcatgtgctttctcatgaagaaggcgcccttccaccgttctaacattttcaagccattgtaattcaatatacgccaaagcccactgtctacgacaaaatgcaaaatgttgaattccggataattgaagaaagtcttcctcattatacaaaatcaaatacctccggtttgacacagtttaccgtatctaatttccattctatttcatactcttgaaatgttttcgggttctccactttattcctgtagaatcctctctggataacaccgcttgacgcttctggcatcttatctgagtgctgccaccaatataaacggcatacttccatactgccttcaggtctggcagaagacgcatcgttttcaaacaaagtcttcaatgtttctttcagcatctctgcatcttcctgggaaaaacctgttttttctgccaactgcacattcacacttcccattaccttataaacggcaaaacctatacgatgttttgttcccatggtatcagacgctttactttcctttcctccttcactattaacactctttgtaatctgcatactgataatatccactggagacaaacttaccgcttgatgaatagataccggtcctcgtaccccaaaagaaacttcttctcctttaaaagcaaatacctgaccaaaacttctgacatcaatccattctttacatgcaatttccgcacacaaatctctgttagcttttttcttttttgcaatttctttttttaattcaacacaaccttctgctctgtcccttaaacttgtaaaaccatcatctgaacgatcatctgattgtacaaaaattttctctcctaaatcttgaaagcgatttcttatttttcttttaatacatacatctgaaatttcaccatatccatctaagtcaattcttggtcgatttccattcaatggatctccatttggatttgcattatgtacgctaataaacaatgtaaaatcaatctttccttttaaagcactcattattttctttctccttatctattttattaaatttattctacttcagcagtttctgtttcttgattcttagaatttcttaatgtcaatgactggctatgaaatcctaataaatacaaaccatctaattttgtattatcctgaaatttctctatgtcaaaaagagaacaaatttcatcaattaagttttcataataacgcctgttttttacatccatcttgcttaaataaggctgtatattctcttcaattattttccatgttgtaaaaggtctttgggaaaatgcgctcatatatcgttttgcatttgtcactctcccattttctccattttttataaaaattttatactcaattctgtctgccacagcgagcagtcttccatacaaataatttctgtcatcacattctttattcaatgccacgttaaactcctccttttttctatcatatctgcatttttttacaaacgaacatgccaatgtaagcaccttttcccaattgcgacgctccttatagctttgaggcgaagaagcttgttttaccgcttgcatcatcaaatcctgaggcaggtttcttccatgccaaatacacgggatcaaacgtttacttatctccacataaagtcgttttctatttttatcaggaattgttaatattccttttgaatctgaaccataaagtatttctactatttcccgcgttcctggaactccgtaatatcctatttttttcccatttttatatttctcctgaaaccactgacactcattatgccatttttctatattctcaagataccttgctgaatctaatgttttatattccgccaaagccagacgccctgatgttgccgcatcaaatgccatcagtaccatttttgatgtaaagtttattttttttctgtaccccgctaacgcgcagtaaaattgctctgctgttatgacattcgtgtctgaaacaaccatctcttgcttttcttcatcggactctccaagaaaatcatcctcgaacggattctcctcttccatatcttccgccttaaagtcaaactttttatcatcttcactccctgaacttatcgtctctgtatctgcatcccaggacggcatctcgattccatccgattcccaggctacaattgtcaacgtatcaaaactccgcccctgctttcttataatccacttcaacgcattatgaattctttgagagttttcattccctatcgcaaatgcctgttcttttccttcaaatcttcctctaaaagtaaaattaatctcatcattggaagatatcagttttgcgccatctccttcatttcgtattttcttagcatgaagatacgatggtgactcctgttttccggtaagataatctaaagttttttctgtctgtaatgaccgtacatactgaataaaattctcctgcaaagttctatcttgccaacatttttcttccaaaacttctttcgttactttctgtctcacaacaaatcttacaaacgctttatcctgtgctacactctgtattttaaatgattgatccaaaaaattatcatcatctactaccaaaacgccactgtttataagatcttgcattacttctttcttttttgtgtaatgatatatggctcttactttttcatgtgtatactgtgataaataccagttttctaatgcttccatatacatttgataacattctgcagcactatctgattttcctttcacatatcggccgtaatctcccgccagatactgaagattatcacataatggatgaggtgcctttcccgctgtacggcttcctgatttttctgtaatcggtattatcgtcagcttgttcccatcggataccctggaggcatccaaaaaattcccttcatcatctattacaatttcgatctgagctgtaacagtcgtatgatgcaacggcagtaaaacacagaaaacattgctatatttttttattattccaatctccgagcgatttctctcatatagcctaagcgcttcttcctcccaactcaaacttgcacctcctcttctgtaaattctcctaacccactaaagttttcttttccgaaatgttttacactcatctcacgaataaaacgcttctccgtacattcttccggataaatacattcgacaattcccccctgtttcatcacaggtctccagaagtttgttgtcattttatttttctcttcttccaaaattgcttcatcggcataggtaatcccatgatacataaatccataagccacttctccctgcatattatcataatatccaataccttctccaaattcacacggctctacaaatgcctggcactctcttgttccaaggaaaacatctcttcgtcccccacgctttaccatccgttttgcaatattatgatgtttattttcattccagtcctgttttaattccggatgattcggattaaattcaaaatgtgctctaacctgataacatacatctttcagataagtataatatgcaagttcatttccaccgttatatgtaattggacgtacgcctttcgtttctgtctgtattggtttcataacccgaaaagcatccactcgccagatcaatgttggtttccaataaatactttccacaattccctttaaagcctcatatgtaggaagatgataactagacttttctcctccgacacgggtaacaggatcggaaaataatgcatactttccctgtacctgaaattctatcgtatttctatacttttccatattctcacccccttttccatttagaaaaatatcgaatccatcttcagttcatcaatcacaccaacttttttatcataatactctttattcaaaactaatattcctgagtctccaggactgtaaattgcgcgatttaatcggtctttcatcgattgcgaaattcctacagtgtataattgtaattttcttaatatttttttctgttcggttaaatttatatatgtcttttctaattcatgtatcaaattttctgcctccttattatagggaaccacaacagatatcgtttcatcatctgagattaccttaaaatattctcctgccgttttaaatgcctgacttaataatggctgttgatgttttccaacatgatctctcctatactgattacgtcctatatcattttttcccaataaatccactaaatttgttccctctaatgccttttttaatacttcgttcttcgtattccattcttctgattttgaaaccggatatttcgttatttccgagcccaattcatgataatacagctgataatatcttttaatcgctaactgggaatctaacgcataatcaaacttctctttttgttcctgaaactcatataataatctttcacatgcttcttgtgctttttctatttcctgaagtttatctgttcgttctatatcttgtgataatttaacaatatacactttacctaaattttcttgctctccatgacgattacatcttcctgcagcttggataatactatccagaccagcgagagatctgataacacattcaaatgaaaaattcactcccgcttcaattagttgtgtactaacacaaaagatcttttttctctccttcaatccaagcttaatcgcatataattcatctcgccgattctgcggacacatatttgtactcaaatggtaaatggtctctcccttatcccatacagtttttactgcttcataaagtaattttgctgtctcttttgtattcacaattactaaaacagacgtacacttttcaaactgatccaatacaaaattttttagatcgtctatcagcattcctcctggtatagatttcgttttatctattatttctacccgtttaaatacttccgcatatcgttctgcatcccctgccatctcaggacaatccacaatattattttcctctaattttgccagcgatggttgtgtagctgaacaaagaattacagttgtattgcaaaattggctcaaaaaattaactgccaaatgaaaaagctccatacaacgtactggtaatgcctgtacttcatcaaaaatcacaacactattgcataaagtatacattcttcgaatactacttttctgccctgaaaataatgtattaagcatctgaactgccgtagtcacgataatcggacaatcccaattctctgtcaacttcctatatttttctgcatccttctcattttcctgaatcacattacaatggtgttctaaaacaaactcctcctgtccaacggccgcccgaatatccgctgcgttttgttctaaaatagaattaaaaggtgctacataaaaaatatgttctttattatacttttccgcatgatacagtgcaaaacgcaaactactgaatgtttttcccgctcctgttggaacagtcaaacgatatagccgattttctgtcatcgctgcctggtaacacaaatctgaaatctcatttctatatcgactcaataaactataatgattctccgatatgacatgcttcatataattatcataattagaaattgccttatgccaaatttcacgttttttttcttcggaaatcctaaacggaagagttgctttttccgaaaaacaagcagcatcactccaatcactatcaattaacaatgacaaaacaagacgctcatacattcccagatagaactctctgtcacctgctttcccttcttgcacaacacatgtaaaattattcacttcctgatataatcttttaaaatccttatatgctgccttcataagtgctaacaaaacatttttatcgcaaattttaaaatattgtttttctattgccgtaaaatcaattcctttttcccttctgatctctgatagagtctttccgctttcaaaatcaatacaatcacaaagcccatgatgagaatagattgctgtttcgattatttgtgatacgacacttccatgcattatcttttcagcaagataccctcctgcagaagaatgatccacatgacgttttacccttttttcgttctgtaacacctcttccatataattctgaaaatcatcgctaatttttccggcatcgtgaagcacggccactgcacatatcaaatttttcaaaatatccaatggacaattttgttgtgctaaacataaaacattatttaaatgggttcttaactcctgtgttctctttgtttcatcgtccacacgtgcaacaaattgatcttcccccaaaaacagtctcatactttctacatgattttccattaatcctccattaatcatttactgataaaaataattatagtaccaaacacctcttttacttaactctaactatatacctgtatttcataaaaatcaatattatgaacataaaataatataaatataatttttctagtcttgtactttacttttaaatatgctaaattaatttcgtcaggtttctttgcctgtgagttgaaaaatatttttttaagttcatccactctggaaaaaggagccactgtttcatcgttccaaaatggatcaataaaacagtggctctttcaaaacaccgcttttgttacagctatatgtttggtcgttactatttatagctgttttattttaacattcgtctgccactaaaatgctttcatttaatcccaaatcacctaataatcgaagataaatatccacatttccatctttctctacttctattttcttaatcaatctatttaactgtacattggtcatctcatgaacatctgtaatatcttcaatctgcttaaaggtatcattcgaagaaatttcttacggtttttgattttcgttccagaaacaccttcgtctgcatataattttactaagacatctccggtgcgctgaatgtattcggagaaaaattcctgttgagctggtcggctttatctgtggaaacacggcaataagctgctatcttcatagcgttacctctctgtatctaattatttttctgttacatctatattatatatcaaaataaagattcataaacagaaaaacaagatattactgatgaaatcaataataccttgtctaatcctcgtctaattattgaataaagccaattatattgatcagtttttactggcttttctatatgttttgcctttcgttgctccgtcatctacaagtttttcatcagcaattaacgctcgcagtaattcttttgttcttgtttcttttactcctaacacattcattaaatcacttgctttgtaccatacatcaggctgcataaaagtaaggattttttcatactgctcttgtctctttttcgtcactttttttccgtcgttttttttcgtcgcttttttttcgtcgctttttttcgtcgcttttttcacaaaagaaagcgtcaaaattgttctgtccggatcaaatctttcttcaatctctggctctacaaacccctcatcattccatacattgaaaatattgggaacaccactgccggcacgttcacctatattaatcaagttaaacattttcatgagcgatttatttctgggatcagactctccacccaaacgcatctgctttttccctgttcgcacataacctggattcgcaaaagtaattttatctgcctctttcctaatcaccacaccacgaaccccatgataatctgcattaatcaaacaatttgccaaagcctcgcgtagtgctttatgaaccggtgtatcatctacgcgttctcctccaaccattttaaatggcactttaacatccttgattatcttattataaactctaaaataaaagtcacaaacattaccagaccattcacccgaactagattgtaacctgtcagtccaccgaattgcagaatccatttcttctctataatctaaaaaatactcaggaaaatgccgaacaatatcatattcatttccaaacataagcattcctgccgctgtcggatgcagctgtccatcttcttctgaaacagccgcagctccgatacttcttaaatattcatgatcgcccaatcgctcaaaaggatgcccttctttcaaagttctatgactgttacgatatccatgaatcgtatcataattcaaatccccaataggaatcttgtccaaaatctccatatccatcgttctttccgtctgatctcggagcatagcttttacctgtaatctggtgcaatgataatccccttcatagtttctccgaaacgttccattgaaaatgtcattattaatataaattggcttttgctctctctttgccataggaacatatattaccataataatatcgtcattcggaccatataaatatgtttccacatcatcatccgtcagaaggttcaagttgacttttttcggattattaattgtatcccaaaaatctttccgcaatttcgcttcattttttagtcctgttgttctccagcttccatctttttcctcttttacccccaagataattactccaccataacaattcgcaaacgaggaatacgtgtcccacaaggaattgggcagaccaccattagctttcttcacttctcttctattgtcttctctatattcatcaaattttgcaagactaaattcttgtctcataacaatcaaggtctcccttcaatatcttaacttcttattcatcagtttaccccgtatccatcaagaacacaagtaaacttacactccaaaatcttttatttttcctccatcttgtcctcttccaaacttctttcagccacctcctgtataactcgttcaactttctttgcattcacctcaataaaaacttttaatatgtaatcggcggtcacttccgcagtattcggattatgaaaacgataattcagtttttgtttcttcatagcggtgcccccacctcccttttctctttgtccattactatgaaaatatctattgaaatagtcctaaacattcaacaaagtctttacctctcgaactttatctttggcaatttccgcgctcctgctagttccatccacttttatcagaacacccgtccccaatatccgatcataaattcttttcttattcacatctgtttcaccctttatcttcctcaagggtaaattggttttcacaatcaatggtttcccaaaacaacagcgatggtctattacgcctttatcctccaccgaaaataattcattcaaaatcatattaaaattcgtcatcttgaccattacttcttgctccaacaaagcatttgcgatacaaccggcaatgtaacttttccctgttcccgctggtgcccacagtaaataacccacatactttttcctctcgaacttttctctcacatgcacattatctcggatgtttcccacccttcataatagaatttttcggataaaatgcttctaaaacttctccacacacagcataatacgtacattttggctgagcggtatctctaattaaaatttgagaaattgatcatatagcagttgttcctctgtatcttacatataagcaaatctcattgcctgaatccctccttctctgattgcgatttcaaacctcaatccaattctttaagtgtttttgaatccccttctatataacgaaagagaaataggctcttttacagggttgaactccatatttcttttattttttcaaaacaagatccacccatgtttaacattatcgattttctctccatgtcatcccatgagttttttcttgccggggacaccccatacccttaaaaataaattaacttttacaaaaaatgtaatagcaatacttcgtaaaaaattggcatttaaagacaaaaacagccatacaatttcatctctgaaatcatatagctgtatttatccgaaaaaaataatttttgtcgcaaagccaattagcgagtatggaaatgctcccctgcgaaggaatactctgaataaaaaaatgtaagaaattgcaatatggtaataccagggtggatcttgctctattctttagcatctaaatatgtaattggattctgtgcactctgatttactttcaaaccagcaatggatttatacaaataaaacttccctgcttcatccaacaactcgtgattttcaaatctttcatctataaaaaatactctgttctccgttttcgaagtcaactgtgtaacatgacttggtaatttttctaatgctcctttacagacatgccacgttgtcggtttatataccgcaactattaacgaattataaaccccaaaaacatattccactgtcttcacacgttctagtgatgctcgccaaataccacgtaccgaatcatacagaacatcttccgtcattcctttttgataaagtttatttatcttaataatcattactttgtgtcgaatatctgattcttgcaactcttctgctccatagatcttttcaaaatcatctactgtcaaagcctccgccgaatgatgccctgcaacaatgtttgttaaccgggtatcttcaacataattaaacgcattaatcagtgccgcttctgctgcaaatgcttccgcttctgtcagattgcagttcataataactttttcaacttccaaaccaactgctttaatctctgctatcgtctttaactttaatttttcactctctggatttccctgactttccaattcatgttcaaaaacccgatttccggttcccttgccaatataaaatattttcctatttctaggatcaatcagaccatagacataatagtctccaagtgataataaacttttctctgaaaacttctccacattctactcctttttgttcgtattcagccattatcttcccctgcaataagatatattttcttatcatcaaaacaatttctgtccgtatgattataaatctaaatcatatcctccattttgtccataaagacaccagtttctggattatggagatctgcaaatgcttccagtacattcctctgcatatccagagcattttctttcaaatgcactccgccatcttgtaagaactcatccacttgtccttctttcacaactggaatacttcctataaactttcccaatgccttacttgcaacaccaatgcctttcatgacatttgcttctactcttccttatttttacatgcaaaaagcctggtcatcaccgagctttttcatcatacatttgattttgtaaatgcttatccccagtccaaatactccttatatacaatatctttctcccgtcctacctcaccacatacaaagccttcacaaaaatacctcttttgttacatccatatgtaccgtactcttacttactccaaacttttttgcggtttgtctcacagttgcattattttctattatataagctgcgatctcaactgctctctcttcaatataatctttcaaaaatattcccctgcaaacattcatttttacaatgtatgcaggggatataaaaattatgttcaagcaggttttcagttgcttcttcctgtttttgccaaatcctatcaggaaataccaaacgggatatcacccgatttacatcatcttcatcttacataaagatttcacagtctggttctacttttttgcaggcagcaagaacattctccatcacttcttttggctcctgtccttctgcaaattcaacgatcatcttttgtgtcataaaatttacggttgcagcctgtacaccatttgttttgcgggcagcatcctccattaagtttgcgcagttcgcacagtccacttcaattttgtaagtctttttcatatccatatcctcctacagcactttctaacgctcaacaattaagcacttgtttaattattatgactgtagtataattcagacataacaagaagtcaatattgtggggatactttcttctaaaaagtagaaaagtatttccatatagaataaaacgaggtcaaacattatgaataatattacattgccgcatgatcatggcaaccatgttgtttccaatactatccagaaagaattagataacattgaaaaatttcagttggtcgctgatattttcaaacaattaggcgataccacacgtgtccgattattttggcttttatgccattgtgaagaatgtgtcatcaacatttctgccatgatggatatgtccagcccggccatctctcatcatttacgtcttctacgaagcagcggattaattgtaagccgacgagaaggaaaagaagtctattatcatgcagcagatacagaacaaagtcaacttcttcacaaaatgatagagcaggtaattgaaattacctgccccagctaacgattgaaataatttcaatccaaatatttaatccacagcaccgttccctcaaccgatctgctccaacattttttccggatcttctgctgccttcaccttatcatttgccataatgatcacaccctcttcatcaatcaggtaggtggttctcactacacccatagatacttttccatagttctttttctctttccagacatcgtatgcctggattgcttccagttctggatccgagagcagtgtaaaggtcagtccctgtttttcttcaaatctcttatgagatgcaacactgtccttactgattccgatgactactacacccttttcttcaaactgtggataacgctcactgtatccacaagcctgttttgtacatcccggtgtgttatcccttggatagaaatataaaagaacacgttttcctcgatattcttttagactgtgtaactctccattttgatccggaagtgtaaagtctggtgcttttattcctgtttctaacataatagatccctcctgttttctacgattttttatactatattttaatttctccgagccttccttctcctttcagatacttcctgtaaatcacaaagaataccagactggtcagacatgctgaagcaccatctgcaatcgcttctgcataaaatgcactctttgcaacaaataaaatcggaagtacgcatgtcgttacaaaatatactgtctttcgaaacagcgacagtccaagagaaagacgtgtcattcccagtgctgtcaaagcatccacaaatacatattgaaggctgagcggcacgaccataagtgtaaacacttgaattccccagatggataaattctggtatcttacgttgtctgtaaagatctgcacaaaatactgcggcagaattctggatacaagaaacataactgttgtaaaggcaatgcacagaagtaatacccatttcactgtttttcgaatacgatccggtttatttgcgccatagttaaaactaatcagaggttgggatcctccggtgattcccaacataggagatgtaatcaaaagcatataactttgcacgatcgttgctgtcgtgatcagtgtatccccctgagcctctccaccataatactgaagaactgcattcagcgcaataatgatcacactgtctgttgcaagaatcaaaaacggggaaaaaccgatcttacagatcctttttccaatctcccattctggttttacaaggtgtatcggaatcggcatttttttactgtggagtgtcagcaacacaaaaatgcaagatgaaagctgtgcaatcactgtggcaacagcagcccccgcaatatccatatccagtgcaaaaatgaaaatcggatccagcacaatattcacaactgctccgatcagagtcgttgccattcccaaaaaaggaaatccctgagctgtaatgaaataattcattcccattgaaaccagtgcgaaaaacgtacctaaggtataaatcgtcagatacgtattagcataagggaacgtcacttcactggcaccgaaccaatgcagcagtgaatccttaattaacaaaaacagaatcgtcagcactgctgaaaacactaacagcatagaaaagctattcgcaagtatccgttctgcactctttttatctcctgctcccagtttcacagaaaaggtaacagatcctccaattccgatcaaagctgcaaaagaggatagcagagtaataatcggggcacatactccggcacctgcaagagaatctcctccaatcaccggaatattcccaatataaatcctgtctacaatactatagagtacattgacaaactgggcaaacataaagggaatggatgtttttaatacgagaagtggaacagaatcccttccaaaatcatttgtctttttcatactgcaccactatcctaccagaatctggtatcctttttcaaaaacttctccaggctttactgcattgattcccttcttttcagaaatatcctgattaaatccagtatcgtcacagcgtcctgcccatggttccagacagacaaacggcgcatttttcggggaccagattccatagctatagaatccttcgcttcttacacctacatatggagtctttccatcctttttacataaccatacttcttctatctgataatcatcacagatcagtgtatctacttgaaataactcttcggaaagctgcagatatccgtcttccaattcaagagaataacttttttccggcaaacctgttccactttccagattcaatccacagcattccagcttttccattccggggaaccataacaaatactcgtcctttgtctcttgggctccttcaaacataaatgccggatgtgctcctatcgtaaagtaaatggtctcttctgatggattcttcacactccagtccacataaatatgtttcccatccagacggtatgtaatatacaattcaaaatcgtacggatatacttctctcgtctcctcattcgagcaaaacaaaaattgtgcttcttctgccgatgacttcacacagcaaaattgactgtctcttgcaaatccatgctgggaagtcggatattgtattccgttgatgagtaccgtatttccataggttttccctacattcggaaacagaaccggagaatgacgactccagaatttcggatcaccattccatagaatctctgctcctgtttttttattaaaaattcttgtcagttctgcacctttttctgcgatttccacacaaaggcatgcattttccagtttcataaaaacttcctccgcttcttttcatttgtctattacaactgtacaccattctgactgccagtacaaccaaaaagcatcagaaaaatctgtttctgatgctttatgttctatcttcttttattctgtggtctcagaggaatctgtctgctcatcttttgcatcatttgtactctcttcctgctctacctgcacacaacttttctgaagatattttgcagccttttcctgcataatggactgctcaatattttcttttccgtttttctcttcatattctgcaatctgatctgtacgatatccggcaagtgccgcatactgtttgagtccgatctcatactctttctctgtaggctctaatttctttttctcacaaagtaactctacagccatctgatttctcactgtgttctcagctgcggttttcactttctcctcaaactgttcttctgtcagtcccatatactgactcaaatactccgcaaactctatttgataatatgctgctgtattctcatactgagtcctgattgcatcttgcttctcttttatctgatctttcggaagatcttttttcacttcaatctgatctaccagagcattcaaaaggttctgatacatttgctgattttcaattttttcttcgatctcttttttgtattcctttaccgtagtcgcttccacactgtttttcttcgcccattcgtctgtcagttccggtacttctaccgaataaattccatttaaagtaatggtaaagacagcaacttttccggccatctctgtattcatataatcttccgggaactgaaccgtaatgtcaaactgctctcccttgctgtgaccgacaatctgatcttcaaacccctgatactctccatttgccccgataaaagaaccggaaccaagttccagatctgtcccctgagcagatccgccctgaaattctacaccatctactttccctacataatcaatatttactgtatctccagtctgtgcaggacgatctgacacttctgttctggtcgcatctgcctgaagaaaataattgacataattggtcacctgctcatccgtaagttctgtctcctcctgctgagggacttctaatcctttatactgtttgatcgtaatatactcattagacaactgactggaacatcctgttaaggatccaatcagaaatactcctgcaattgctgcaatgattctcttcttcatcactttcccctttcactttccacatcattagtcaacgcccattataacacattcctgcttccaaaaaatatagcatttctaagagttcacaagattttcacggtttatctcttttcacttacaaaagaggagataacaatcttgaaaactgctcttttccacgaatgaccaaacttctctggtgatatgcatttcttgtgatctgtgtagattttgtcatgtcattttcaaatctctgttccagtttttgtgtcgtctcttcactatatataactgcattgacttcaaaatttaatccaaaactgcgaaaatccatgttcgcggttcccacacatgccactgttccatctaccgtcacagtctttgcatgaagaaatccgttgtcgtatacgtaacatttcgctcctgcttccaccatttcaccaatatatgaatacgttgcccagtatacaaacggatggtccggtttacacggaatcatgattcttacatccaccccggaacgggccgctatcttcaatgcatccagaatcgaatcatccggtataaaatacggagtctgcaaatatacatgatcttttgcactgtggatcagccgcaaataattgtcatgaatggttttaatctgcgaatccgggccactggaaataatctgcacaggatctcttccggccctctcatactctgggatttcaaacaacgcatcctcctgaaacaaattttctttcgcagcatagttccagtccaacacgaatcgtactgccaaagaagttaccgctgcaccttcaatgcgcagatgcgtatctctccaatagccgaattttttctcgtccattcccagatactctcttcctacattgaaaccgcctacaaatcctactcttccatcaatgacaacgattttgcggtgattccggtaattcatccgaagctgcagctttccaagcaatgcagggaaaaactctgccacgtggattccttcacattccaggcgctcccagtcccggttacgcatcccgcggcaccccatactgtcaaataaaatccgaacttccacaccttctcttgctttctggatcaggaccggctcaatatgctgccacaattcatcatttcggataatataatactgaaaatgaatatacttttttgccccccgcatctctctcagaagtgcctgaaacttttcttttccatctgtataaatctgaacatcgttattatctgttaagaccgcctgaccggcttccagattatacaaaatcagatcgcggtatctcgccactgccggatttgtcagacggagttttcgcctgtatatcgtttcttcctgccttcgtaccgcgtattttaattctccttcaatctcttttgccttaaacatcctgcttttatgaaaatcctgtccgatcagcaaatacaatacaaatccgagaatcggtataaaatacagcaataaaagccatgtccacaccgtctggggagatctcctttgaaaaaatacaataaccagagaaagtatgatattgatcaaaaccagattatccatcataaaatgatacacacggactgcgccattccatattgtttctgccataactgcctccctctgttcctttttacatttaatccgttatagtatacctgttttctccaagaaaagtaaagccctgcctgccaaattgcttgcacttccatagaaacaatgttacaatattacatgcataattatgaaaaaagagaattttaggagggttttatcgtgtctacaggatggatcgtactgatcgttgtactcgttattctgatcggtgtactcgttggcctttatttctttggaaaaaaagcagagaaaaaacaggcagcacagcaggaacagatggatgctatggcacagaccgtcaatatgctgatcatcgataaaaagaaaatgaaactcaaagaagccaatcttccttccgcggtacttgagaatacaccaaagtatttaagacgtaccaaagtacctgttgtgaaggcaaaagtcggacctagagtgatgactctgatgtgtgatgtcaaaatctttgatctcattccaatcaaaaaagaagtgaaggcaaccgtaagcggaatttacatcactgccgtaaaaggtgcccgcggaccattggaagctccggaaaaggaaaagaaaaaaggcttttttgcaagatttaaaaaagacaaaaagtaaataaaagagcattgccggcagaatttctgcagtgcagtgctctttttttatacagctattctgctgcctttggatacaatattcattcggattttacaatttgcaagcggctcatggttcacatccagttcataatccacctgtaccttgattttttcatcagagacttcgatttccatatttctggtattcactccgaccagcatctgaccatatggagttttataatacgttagattctttttattcttttcaaaaatcatatgtgtattcgataatccgctcttcatgatctcaagactgtctgttccggatattttaatcttatttttgatcgtatcactgactccctctatcacttcatcataaataatatagtgttttccatttttcaaataataggtcgccggtgttactacttcaattacatcatccgtatcaggctctggaatctgcgcattcatatccatatgcagtcctgaaatgctgactaatacatcctttgtcatatttactcacctaatattcttctatatttacaatattcgcttttgaaatatcaaacggcattactgtattggcaaaatctacaaatttttctgccgcatcactgacataaaactcgtacttgctgcttatcccactggtgccattattctccatatgttcactttggagcaatcgcttaaggtccattgccgtctcataagcaggattcacgatctgaattttttcgcccatataagcacgaattttagaacgcaaaagcggatagtgggtacatcccaaaatcatcgcatcaatttctgtgttcttcagtgattccaagtaatattcaatgacctcttctgtaaccacatgttctttaaatccttcctctacgagtggaacaaacaaaggacacgctttctccctcacatgaatgttcggattcatctgatggatcacttttgtatacataccgctctttaccgttgcatccgttcccactacaccaatttctccattttgcgtagcttctgctgccgcccttgcacctggaacgatcacaccaatgatcggaagatcaaattcatcccggacagtatccaaggccaatgcgcttgcggtattacaggcaatcacaatggctttgacatgcttcgtcttcagaaaacggataatctgttcagaaaaacgaatgatattgctttgggatttgtttccgtatggaacgcgggcagtgtcaccaaaatatacaatattttcatgcggcagctgccgtgttatctctcgtacaacagtaagcccgcctacaccggagtcaaagactccgatcggggctgtttttttctcacattccatactcataattttactctcctagattgcaaatgattttgcgattttatactgatattccggaatagacttcttcatagacaatgcctgatcaatatcgaaatccaaatattgtccaccctgatatccgattacacggttggattttccttcacacaacaaatccacggccagtgcgcccattgtcgatgcatataccctgtctttacatgtagggcttcctccgcgctgcatgtgtccaagaatagttgctcttgtctcaattcctgttgcttcttcaattctctttgccatattgatggaatcaccgattccctctgcattgatgatgatgtaattctttttcccacgttttttattttccaggatatcatcgatcagtgcctgctcatcataatctttttcttccggaagcaggattttttctgctccattggcaataccacaccacaatgcaagatatcctgcatcgcgtcccattacttcgatgatactgcatctttcatgagaagtagaagtatcacgtactttatcaattgcttccatggcagtattaacagctgtatcaaatccgattgtataatctgtacatgcaatgtcaaggtcaatcgttccaggcaatgcaattgtattcacaccaaggtttgccaacttctgtgctcctgcaaaagatccatctccaccgatcactaccagaccatcaatcccatactttttacagattgcggctgctttctgctgaccttcttctgtacgcattgcctgacaacgcgctgtctgaaggatcgtaccaccgcgctgaataatatcggatacatcacgtgcagataaatcaatgatctcttccttcagaagcccatggtatcctcttctgattccacgtacttttaacccttttgcaagtgctcttcttacaaccgcacggattgcagcgttcattcccggtgcatctccaccactggtaagcactccgatcgtacggactctatcttcaatctcttctaacattttttctttttcttctttgtttgccataactttgccacctttctgaattcttctactcttcaaaagtaaagtttgcctattttttaacactccgggtatattctaccttatttatattcctttatcaatagatttttccacgacttttatccgtttctcgccataatgattcatcaatctgctcaagacttcctggctgatccgaatatttctgttccttggaagccgcttgatcgcccgctcttttgtacaatagatgacaacctcgtcctctccttccgaatctgccagatatccatacagaatctgttcgttcttcaggaaatcttctttatctgaaaattgtacccaaagttcttttttcgtctgttcaaacggaatgatcgtctcacaaatcagcttgctcggcttttcttcttcctcggaaacccttccctttacaaagatttttttgtcgatttccaaatactccctgttcttttcataatctcgaggaaaaacgaccacttccacagttcccagcaagtcttccaaagacaaaaacgccatcatctgatttgtctttgtatgtttgattgtctttgcagtgatcataccacccacaatctcccgcatcccgtcatgtacttttgcacgtccggtctcttcatccggctgaaaatccaatgtcgtcgctgaaatggattttctccacttttcttcatattcttccagtggatgtccgctcagataaactcccagaacttctttttcaaaagccagaagattctctttggaatactctccgacatccggcagcttgatctcaaactgttctttttcttcctctcctaccagatcaaaaagtgacatctggcctgtcatggaatattttttctcctgattcacctgttccacaatctgaacataaatgctcataaactgctttctcgttccacccaggcagtccaatgctcctgatttgatcagattctcaatcgcacgcttattcaatccttcttttacaaacatacgactgataaaatcttccagatttttgaattctccgaattcatttcgttcctgaatgattgaagcgatcaccggttttccaatgcttttgatggcagccaatccataccggatattcgttccatctacggaaaagttgctcgccccccggttaatgtccggtgacaggatctgaatattcatctgtctgcaggcatagatatattctgccactttggatggattttcaatcacagacgtcatcaatgctgccatatattctaccggataataatatttcagataagcagtctggtaagagactaccgcatatgcagccgcatgtgatttattgaatgcatattttgcaaaatcaatcatctcatcataaattttattggctgtcttttcatcaattccatttttaatacatccaggcacgccgttctcttcatctccatagacaaagatttgacgctctttttgcatcacatcgccctttttctttgacattgcacggcgcagaaggtcacttcgtcccagcgtatatccggcaagatcacgcacgatctgcatcacctgttcctgatatacaatacacccatatgttggtgccagaatcggttccagctgaggacaatcatatgtgatggaagctgcatcattcttgccacgtatatactgcgggataaaatccatcggtcccggacgatacaaagaaattcccgcgataatatcttccaggctgtttggctttaattctttcataaagcctttcattccgccactctccaactggaaaattccatcggtctttccggttccgatataagcaagtacctgcttatcattgtagtcgatctgatccatattcagttccgggttttttccttttgcaagctgcactgcattctgaatgacagtcagggtacgaagccccagaaaatccatttttaacagacccagttcttccagtgtagtcatcgtaaactgtgtcgtgatcgagccatcggaagctcttgaaaggggaacaaaatcatcgatttcccgctgaccgatcacaacacctgccgcatgcatggaactgtggcgcggaagtccttccagacgtttacacatatcgatcagcagttttacctgcggatcattctcatatgtctttcgaagttccggattcatctgcagcgctttatcaatggtaatattaagctcctgcggaatcatcttggctatggaatctacaaatgcatatggaagatccatcacacgtcccacatcacggatcacacctctggctgccagcgtaccaaatgttacgatctgaacaacccggtcttttccatatttgcggaccacatagtcaatcacttcctgccgtctctcaaaacagaaatccacgtcaatatcaggcatcgtcacacgctccggattgagaaaccgttcaaacaggagctgataccggattggatcgatgtttgtaatctccaggcaataagatacgatacttcccgccgccgatccacgtcccggccccactgcgatcccgtgatcttttgcatattttataaaatcccatacgatcagaaaataatccacgtatcccatattctgaatcgtatccagctcgtatcgcagtcgttcttttaattcctctgaaggattcccgtaatgcttttccagtccctcccagcacaatttgttcaaatattcccaggatgtcattccatccggcacatcgtattttggcagttttgtgactccaaattcaatctccacatcacagcgatctgcaatcttctgcgtattctccagcgcctgttttgcatatggaaataaatcttccatctcctgtggagactttacataatactggccgccttcataacgcatccggttctcgtcatccagctttttgcctgtttggatacaaagcagaatgtcatgaggtttggcatcttctgcatacgtataatgaatatcattcgtcacaaccagctcaattcctgtctcctgtgaaagctggatctgcctttgattcaccagctgctgctccggaattccatgatcctgcatttccaggaaaaaattgccttctccgaaaatatcctgatactccagtgccactttttttgcctcatctacaagtccacggctcagataccgctgcacttctcctgccagacaggcactcaaggcaataatgccttcatgatactgccgaagcagatctttgtctactcgaggcttataatagtatccttctgtaaatcctctggaaacaatcttcatcagattcgcatatccggtattgttctctgccaacaggacaagatgatgatatctgctttcccctcctgctgtctcacggtcaaatcgagaattcggtgctacgtagacttcacatcccagaataggcttgattccctgattttttgcctctctgtaaaaatcgatcacaccatacataactccgtgatccgtgatcgcagcactgttcatgcctaattctttcactctggatacatattctttaattttgttggaaccatccaaaagactgtactctgtatggacgtgtaaatgcgcaaaactcataattcacctctatatccagcattgctgtaaatctaaaaagggcgttcccttacagagaactgcccttacatcttctcatgtctgccgaaaacggcaattcaaaatttcagattcttcttattcaccattgatcataaaatgaatcagtctttctgtatcttcctgttcatatgcaacgatctcaagttccggaatctctccatttgagaaaatattggccatagatacatactgggaaagcttggatttcaggttcagtctgtctccttctcctgttaccagttctactcttcctttgcagttatctactactttaaaaaatgcgtctatgtctgtaatattctgtactttcatatgattgtcccctttcttctctattttctatatttcttttttcattatatcctatttaccatggattgcaagtttttttagcgaatttgaatgctgtccgggcagattttgatacgatgctcttttaacaatctgcctacagcgcgtttgaatgccgccttactcattccgaactctgccttgatcgtctccggatctgccttgtcattaaatgggagtaccccgtcatatgactgcattcgtctgtagatcagttctgcatctgcatccatctgctgcggaatcttgtttctaacgcttaaatccagctttccatcttcctttacattcgtcacccgggcttcaatctcatctccgatccggatatttccaaaaacatcttttttcggaattcttgcagaaaactgatgatccaccgcaacaaaaaccccaaactcatcacttctgtcgtaaacgattccttttacctgatcgtctttctgatacggcgaatctgtacgaagcatatgatataccttcatcgtcgcacaaagtctgccgcttttatctatataaagacctaccagacatttgtctcccttttgtacttttgcagtctgttctttaaatgggaggaataaatctttttccagtccccaatctaaaaatgcacccatctttcctgtatctaccacttccaaaactgccagatgtcccatggtcagcttcggttcattggtcgttgcgatcatgcggtctgatgaatctcgatataaaaatacctctaccggatctcccggttcgattccctgcggaacctgttttttgggaagcagtacacgctcttcgtcatttccgaggtacacgccaaaatctactatttttacaaccgttaaaacctgtttttctcctaatctcatttactctctcctcttcgccgttctacagacagtataccatgttctcttatctgatttcaatcaccgcatacggttttccatcctgatcacacaactctgtcacgattcgattttcttcttctgctacttttggaaaaataacatctccgagcactgctgattttttatattccacccggatctgatggatcggaagttcttccggcagaacttccaatgccatctgtacatactgacaattattcacatgctcattggtatcgatatgatactttctcaccggaaacgagggcttgacctgcagattctccggcagacggattttgcgatcctcatattccatctcaagagcaggctctgccccataaggaaggacatcttccggcctgggtcttgcaggtcttcccttctccacatccataaagacccatacagaattggcatacgccaaccgttcgccgcttgcaccatccaacacaaaattccgatatccatacaagcctttaaattctgttgcaaatgtgcctgctgtaatcacttctcccaatgccggcagtcgattgatcacaatctgccagtaagaaaggatccatgccttttttctttctcttaacacttccgttcccaatccgatatcttccgattgaaatgtgctgcagtcctgaaaataattgatcaaagccggaagtgtcatatttccggtatgatcgatctcactgtatcttactctgctgtcaaatgtgtacatgtttttcttccttcccgaacagtttctgttcttcttatatgtgtgccttataactatgctccatcgtaatgacgcactgatacctcttatcgattgcctgcagcttttccatcagttgaagctgcaaactgttttgttcctcttcgctatacccaaacggaactaccatatcaaaaatcaaattgatctgccccatcccattgacaactcgcaaatcatgaatgctgcattgccgatccaacgatttcaacgtgttttctactaccgtccgcatatgcataacctgttcatcccgcatctcaatgggatccatatggatcacaagaagaattcccagttcatctgctgcatcccgttcaatccgatcgatcagctcatgtgcctcctctatatctgcatcattgggtacttccgcatggatcgatgccatactctgattcgggccgtaattatgtatgatcagatcatgcgtaccttcgattccagggtaacgttctacaaagcgtttcactttatcatactcttccggatcgattgcctctccgatcagtggttccagtgtatcttttgcaattcctacgccggcccacatgaccacgagcgccactccgattcctacgattccatcaatattcactcctgtcaagcgaaagatcaccagggacaggatagttgcactggttgtgatcacatcccccatggagtctgtaaatactgccatcatcactttagaatctattttcttgcccagttttttattaaatactccaagccatagtttcactccaatcgataagatcaaaatcaccaccgaaaccagctgaaaattcagttcttccggtgtcctgatcttggaaatcgaatctttaaaaaacgtaaatcctacttccagtacaagaaatgatacgatcagcgccgctatgtactcaattcgcccatgtccaaacggatgctctttatctgccggcttacctgccatcttcactccgataaaactgatgatcgaagatgccgcatccgacagattgttgaacgcatctgcggtaacagaaacactgtggagcaaaagccccacaataaactttaccaaaaacaaaaatacgttgcagacaatccccaccatacttgccagcactccatatgcggtgcggactgctgatttttcaaccgcttcatagtctttcacaaaatgcctgactaaaaattctgtcatacttttctttcgtctccttctgtcgttttgtagcccttgttcacaataactctttaattcttgaatatctcttccaaataaaaacggaattttactgtttccggtttcttttcatcctctgaaaacacaatcttactgttttcactttctgtttcttccgaaacggtatgcactgcatcccaaaatgccagctccggatataacattccccaccagttatgaccttttgcatttccgatttctatccggagtgcttcgtaattgcctgccggaaatgtcatatcccgatactctttctctggaaaataagctgtcgtcacagctgcattgactggatcgtcacatcctttttctaacagcacctgccgccctgcctgctcaatttcatcacaatgggatcgaatccactcttttgttaaagctgcgtctttttctccaggcatcttttcttctaaaaattcgatcactccatttcgcacacacagcttcagttcctgatcaagtgcactgtcactgttcgccagcacatgaaatctgagtacctcatccgcaagttctttttgtacctttgcctctgctgtcctctgcgcagtacatcccagctgtccaagcaaaattcctgcaatgagcattgacagtaatacaaggattctgtttttgttctgattcaaatatttcatatgtatctcctccggtttcatttttgatatccgaagtatgctccaaaaacaaaaactttatacaattttccgtaatttaagacgtagtgaagaatcccttcactacgcctcctacttatgtctcaatgaatcagtcactgctgtaacctgattttcaatatgctgacccatgatcttagatgcggtctctttgttgctcttttcaatcgcttcaataatttcctgatgttccttcaaaagctgtggataacattcctgctttttcagatattctactctgtagcgatacatctgctctctgaaattattcaaaagctgaaccagtctttgattgtccgtagactgacagatgatatcatgatatgccacatctgcctctgcaatttttgtcacatcatcgctatctaaagattcttcaaactccctggctgctttctttagctctttcagaccattctcatccatccgctcacacgccagctggactgcaagttcctccaaagccttcctgacttccagtacatcattcaggcttttttccgtaatctcagccacttctgctccgcgtcttggaatcatcagcacaagtccctccaattccagtttgcggattgcctcacgaatcggtgtacggcttacccccagcttgttagcaagcttaatttccatcagacgctctcccggctttaactctccacggaggatcgcctgcctgagtgtcttaaataccacatcacgaagcggaagatattcatccattgtcacatctaatttcggttccatcttatgtcctccttgcgccatgcacatttgtcacatatacttgtttcgccagtgcctttttcctgatctgttcctgtgctcttcgtgccgccgcacgactttcaaaaattccaaatacagtgggcccgcttccactcatcatggcattgagcgctcctgcttttttcatctcatccttgagtttttcgatcaccggatacattccaatggtcacatcttccaatacatttcccatatgagaagtaatctcggaaagagaaccctgctccaggcctctgatgatcccgtctatatccgggtgctctatgatctcttttgcatccagtgcttcatataccactttggtagaaacactgatcggtggttttgcaatcagtactgtacatgcaggaagtgcagggagcgtcgtcagttcctcaccgattccctctgccagtaccgttcctctcataatacaatacggaacatctgcccccagacgtacgccccgctccatcagagacttctgacttaatccaagacggaacatcttattcattccaaacaaaaccgctgctgcattggaacttcctcctgccatgcccgctgctaccggaatatgtttgttcaaaataatcctgactcctcccggaagctgaaattcctccatcagcatcgcagctgctttatatgcaatattattttcatctgtcggaagaaaatgcagattggtctctacttcaatccccggcaagtctgttcttgcgatcgtgacatcatcgtacaaatatatggactgcatgatcattcgcacatcatggtatccgttctctcttcttcccaatacgtccagtcccagattgatcttggcaagtgcctttaattctatctgtttcatcctgtgtcctccgtttgtatcttgtatacattatcggacgaagtccgcccgccgcagcatgcattacaggatgcccggatgggtatacatttgtgtttatagtatacccattttgccttgaaaaatcaacgttatatctttacattccaatctctttgcatatgatcagtttatctcccggcttcatttttccattttcaagatggttgatctgacagatactttcctctgttgtcatatattgttttgccagactccacagatcatcccctgatttgacgatatatcctacaattcccggctttttcgccagttcttcccgatccgcctcttctaaagatacttccgtgatcacctccatcgggatctcttttcgtaaaaagatgtcaaaagccagaacagctttgatttctacagaatcacttcctgtcatggtcaccgagatctgttccactcgatttgaaagctgataacgtacttcctgcggcatatccggacactccagcaaataagaaaacggcaccattccctgccagtttccaaatggaagtgcatcctctgctttcagatacagaaatgacacatgcaggattccttccaccaggattcctccctgcttttccgctttgatctccacatgttcaatctgtacacttcctgtactgtgacagatctgcagaacatcgtctttcaattcggggagcgacagattttccacaatcttgcatttggactgattctgcagaagcagctcttcgtaaacagcttctcttgtctgatacgaaactttctgttccagagaatacagatcttccagaagcttcagttcctcctcttcatacagattgatccgaagactcaacgttccctcaatcccaatgatacgcatctctccatcttcatccatcctgacatccgagagtgtatcttccaaagtatgctgtacatcataatacattccttcagatgcaccaccacattcgatccgcccctcaaaaggaacactctgctccaaccagtctgtttttccctcctctgacagatacatacaaaaaatctgcagttctccccgcaagatcagttcatcctgccctgccctcatttccagctttcgtcctgtgatctctgtcagaagcatttgcccgatgctttcttttgtccctgggatcgtaatttcttctttgatacgatatgtatcctttttcgctgtatgtaatttcagcagattgacacttttctgcttcttataaatagaggcactactctgaatatccaccgcagtctcttcctcgatcagattttcacacccgatttccatttcgatcatcgcacgaatactgatttttctggaatgtaccaaattcgtactgaattctgtccggatattggagacgacatattccgctcgctcttccccttccatgtataccatctcttcaaatgggattttcccttccagtactgccggcatcggctctccctggtcagtcacgtacagaatctgaaaatatagtttgccggaaacacgtacataattttctaccagtttcacatcctcgatttttaccgtacccagccccttgatgatccggcgtacatcctgtttggcatccggcacattgtaatcttcatccagataaaactggtcaaaggttttctttccttcctgatgataacgaatggttttctgtatcagttccatatgctcctcctactcgaataaaatttctttttctgtctcatctaacttcaccaccacatagggataggtcactatatcttttgttttttctcctttttccggccccagaagacttgtctggatccgcaccgttttctccccctctgacacggcatccaccttcacctcatatccggttttattctgcggtccataacttctcgctgcatacacgtcttcattttccgtatataccagcataaacggatgctttttttcctgttccatccatatttttaattcttccggaatttctcgctcactcaacagctgaaactccgcattcttttccccggtaatctcgggcttttttcggatacagccactggatgaccagatcgatgataaaatcaccatccacaaaaccgtaattttaaacattttactttttctttttggattcaccttctgctccggaggctttctttccctttatcttattaacatttctttctttttatgaccacgaaacttgtatttcacggaatgctttagtataatctgtactagactttaaaaaataagagagaaggtttctaacatgattcgatttatttgtgttgttgttttccttgttctgtttctcattctgacgattccggtctttttcattgaatggctgatcggaaaattcaaccggaatgcacgagattatagttgcctgagaatggtacagtggggattcaaagcaattttaaaagtaaccggtgtacacacaaccgtgatcggaatggagaatatcccggatgaaccggtactatttatcggaaatcaccgcagtttcttcgatattcttctgacctattcccgctgcccgcgtctgaccggatatgtcgccaaaaaagaaatggaaaaaatcccgttgctgtcaacctggatgcgatttgtctactgcctgtttctggatcgtgagaatccaaaagaaggcctcaagacaatcctgcaagccatcgactatgtaaaaaaaggaatttccatctgcattttcccggagggtactcggaataaaggggaagagctgagcatgcttccatttaaagaaggggcttttaagattgctacaaaaacaggatgtgcaattgttccgatttctatgaacaatactgcagcaatttttgaaaatcaatttccaaagatcaaaaaagtccatgtcgttgtagaatatggcaaaccaatctatccaaaagatcttgcaccggaagacaaaaaacacatcggtgcttatgtacagaatatcattcaggaaacgatccataaaaatgcagatttagtctgataaaaaaacaaggagatttgttatgagagcagataatttaacgttgctcacagatttatatgagctgacaatgatgcagggctattttgaaaaacagtccgcaaatgaaacagtaatctttgatgtatttttccgggaaaatccggtaaagaacggctactccatcatggccggcttagaacaagtaatcgaatacatcaaaaacctgaatttttcttacgaagatgtagactacctgcgaggactcggtattttcagtgaagattttctccactatctgagtggatttcatttcagcggaaacatctacgcaattccggaaggaagcgtcattttcccaaaagaaccgattttaaaagtcattgctccgatcatggaggcccagcttgttgagactgcgatcttaaatatcatcaatcatcagagtctgattgccacgaaaactgcccgtgttgtccatgcggcacagggagatggcgtaatggaattcggactgcgccgtgcccagggaccagatgccggactttatggggcaagagctgccatgatcggcggatgtgtcggtacatccaatgtactggccggcaagatgttcgatgtgccagtcatgggaacacatgctcatagctggatcatgagttttccagatgaatacactgcttttaaagcttatgcagaactgtatcctgacgcatgtaccctgttggtagatacttatgacaccttgaaatccggtgttcccaatgcgatccgggtgttccgtgaaatgaaagaagccgggatccatccaaaaagctatggtatccgcttggacagcggtgatcttgcctacctgtccaaaaaagcccgtgcaatgctggatgctgcaggatttgaagatgctgtgatcgccgcttccaatgatctggatgaaatgctgatcaacgatttaaagattcagggtgctgccatcacctcttggggagtcggcacacatctgatcacatccaaggactgtccttcttttgggggcgtctacaaactggctgccattgaaaaagacggggaatttattccgaagatcaagatttcggaaaatacagaaaaaattaccaatcccggaaacaaaactatttaccgtgtatatgataaagaaaccggaaagcttcgtgcagatctcatctgctttgcggacgagacttatgatacatccgaagaactgcttttgttcgatccgaatgcaacctggaaaaaaacacgccttgccggtggaagttatacgatgcgcgaaatgttaaaaccaatcttcatacatggagaatgtgtatatacctcaccgtctgtaatggagatcgcggcatactgcaaacaggaaaaggactctctctgggatgaaacaaaacgacttttatatccgcacaaagtatatgtggacttgtctcaaaaactttatgatacaaaagcgaaacttttaaacgaagtaaataaataaaataggagatcattatgaaaattatcgtattagccggtggactcagtacagagcgtgacgtttctcttgcttctgctgccggaatctgtaacacattattagaaaaaggacatgatgcatttcttttggatgtatttcttggtctggagaatgcgccagagaatctggaagatgttttcactcttccgggacatggtctggagattgccaaaaacatttccgagacagaaccggatctggcagctgtcaaagcttcccgtccggatcagtcagactgtttcttcggaccgaatgtcatcgagctttgtcgcctggcagacatcaccttcttaggcctccacggcggcgaaggagaaaatggaaaactgcaggctgcatttgacctgcttggaatccgctacaccggcccggactctcttggatgtgccgttgccatggacaaaggacttacaaaacagatttttatggaatccggtgttgataccccttccggagtctgtctgtacaaagaaaacagtgactgttccttagaatctctgggactttccttcccggttgttgtaaaaccatgttccggaggctccagcattggggtgtatattgtaaataccgaagaagaataccgccaggcactggaaaattctttccgctatgaaaatgaagtagtcatcgaaacttacatcaaaggccgtgaatttgcctgcggcatcattgatgggaaagcgcttcctccaatcgagatcattccaaaaaacggctggtttgactatgccaataagtaccaggcaaatgctaccgaagaagtgtgtcccgccaatatcagtgaagaaatctccgagcgtatgaaagctctcacagttcgtgcttttcaggcattgaagctgaatgtatacagccgtgcagacttcatccttgactcgcagggaaatctgtactgtctggaaatgaacacccttccaggcatgacatctgccagccttcttccgaaagaagctcttgcagaaggcattgcatatggagatctgtgtgaactgattatccagaaatctctggaagcaaggtatcagtaagcaaatacaataaaggatggaacgcttatgaaaaacatgacattaaaggaaatcgccgttgcctgtggcggaatttattacggtgatgatgaaagttattataaagaagtctccaacgtagtgattgacagtcgaaaagtagaaaaagacagtctgttcattgccatccgcggagcaagagtggatgggcacatgtttatcccccagacgatccgcgatggtgctctgtgtgccatttctgaaaaacggattgagaatgcctcttatccatacattatggtgacctcctgtgagcaggctttaaaagacattgccgaacattaccggaaaagtctgaacctgaaagttgtaggaatcaccggaagtgtcggaaagaccagcacaaaagaaatgatcgcatctgtcctgggagaaaaatacaatgtactaaaaactgaaggaaattttaataatgaaatcggactgccgcttacaatcttcaatattcgggaagaacatgaagttgcagttctggagcttggtatcagtaattttggagaaatggaacgactcgcaaaagttgcacgccctgacatctgtgtgatcaccaatatcggagtagcccacctggagcatttaaaatccagagagggaattttaaaagccaaaacagagattttcctgtatatgaacccagaaggctccattattttaaatggagatgatgatatgctctccacagtacatcccgcaaacaaaatccagccggttttctttggtctggataaaaaccaggatttttatgctgatcagatcgagtcctgcggactgagcggtaccaatgccgtattccacacaccgaactcaaccttttgtgcacacatttcaattccgggcggacacatggtacacaatgcactggcaggaatcgctgtaggatatgcactcggaatgaacgacgaggaaatcaaagcaggaatcgaggcactggttcctctggccggacgaaacaatctgatcaagacagattttctcacgatcatcgatgactgttacaatgccaaccctgcttccatgaaatcctctctggatgttctggcaaaagcagacacccgtcaggttgccattctcggcgatatgttcgaactgggaccgacagaaaaacagatgcattatgaaatcgggaaatactccgctgaactcggcattgatgtgctggtctgcattggacagctctctgaacatatggcaacaggagccagcgaacaacactccagaacgcaaatattttattttgagacaaaagaagactttctcgaacagacagatcgtatcttaaatacaagcgatacggttcttgtcaaagcttccaatggcatgaagttttcggaaatcgtgaatatactaaaggagaagtaagatatggactatcagatgcttgttcttgatctggacggcactttaaccaattccagaaaagaactgacagaaccgaccaggcaggctctgatcgagattcaggaagaaggaaaaaaagtggttcttgcaagcggacgcccgatcaatggtatcgttcctctggctgaaaaactgcatctttccaaatatggaggttatatgctctctttcaatggggcacggattacccagtgttctaccggagaaattgtctacaatcgaactctcccggctgatgtgatcaagccgatctttgagatcacatccacctatccgggactggatattctgacttatgacggtgacaagattctatccggtattgcatccaacgaatatacagaaaaagaatcttttatcaataaaatggacattgtcgaagtatctgattttgtatcccgcctgactttcccggtcaacaaactgttggttgcaggggaacccgatcttctggaagaactgatgccggtacttcagcaaaagtttcataaactgctcaacatttatcgctctgagccttttttcctggagatcatgccccagaatattgataaggcatattctttgcaaaaactgctcaacagcatcgggctgactgcagactctatgatctgctgcggagatggattcaatgacatttccatgatcgaatacgccggacttggcgttgccatggaaaacgcacagccaattgtcaaagaaaccgctgattttatcacaaaatcaaatgatgaagatggcattttgcatgtgatcaatacgtttttacgataaccggaatgataagaatccaaaaagggaagtactgcaattgacagaattgcaaacttcccttttttgactgcttcatttaccgatttttaaaaaagattataacaaaatgaaatcaaaaacggcaccattgcagaacagatcacaccattgaatacagacagaaccactgtttcttcattcgtataccgaatcatcatcggcagtgtcgtatcctcactagtcgctcccgcaggtgcaatacaagtataataattcaactttttggaaatccacggaatgctgaaaaaagaaaaaatctcccgcagcagattgcttaaaaatgcgatacttcccacctgtgctcctgccagatttccaatcgcaaccccggaaaaactgtaccatccaagtccacttgcaatggctgtactctcaccaagcggcattcccgtcagaagacctcccgcaattcctcctaaaatagagccaattacgattcccagaggaatcacaaaaattttaatatgatattccttgatcttgctgacaatcccctgattgaaaccaatgctgattcctaccaaaaacatcaacagatataaaatcatatctttattcgatgtaatccaggatacgactacattctcatccagtcctgtcatcccgcatgcaataccacccagcaatgcgataatcgctaaatataccatatctactttttcccctttccattctttttctgttccaaaaagtgtctggtcagaggatagaccaataatacagatcctgctgacggcagtaaaaagaagatcacactttgaattcccaatgtggaaagctcttccaaaaagttttcccggcttcccaacagcactcccatggagaaaatcagaagcaatgtacataccacttgcaaaatctgattccaccgattcaaattacgcggcaataaaaacttgccggccagcactccaatacacatgattacaataacatccatcttttgtatccccgttctttctctcctttttcggtatcaaaaacaccccattcgtacaaggatatcacaaaaaatgtgtgctcgtcaatgccttataaatccagagtttccagtactcttttcaattccgatgccgattgtttcaacttttccttttcgccctcattcaacggaatctccagaacctgctctgcccctttctgagataccagcgtcggcacactaatacacagatctttcaatccatattccccctccatcagactggaaactggcagaacggaattttcatcacgaataatactttctgcgattcttcctactgccatagccactccatagtatgtcgcaccctttcgttcaataatctcgtacgcactgtcacgtacttctttataaatccgttccattgccgcatcatgttcataatgccctcgcagttcacagaaatcatgaatatcaattcctgaaacattggcactactccagactgccagctcactgtctccgtgctctccgatgataaaagcatgtacacttctgctgtctacatccagatgttcactcaacagatagcgaaaccttgccgaatccagaaccgttccacttccaaagacacgctctttgggataaccggaaatcttcagtgcagcataggtcagaatatccaccggatttgccacgatcagaagattcccttcaaaattcctttttgtgatttccggaataatcgatttgaagattgctacatttttatgcaccagatccaaccttgtctcacccggtttctgatttgcgcccgctgtgatgatgatcaatgcacaatcgctgatatcatcataattcccggcataaatcttcatggaatggacaaacggtcttccgtgactgaggtccattgcctctccctctgctttttctctgtttgcgtcaataagaaccagctctgaaaataatcctttctgtaccagattaaacgctgtagatgcacctacaaatccacatcctatcactgctgctttttgaatattcatcatattccctcccttatcttaaaaataataatcattactgttttaaatcctactataaagatatgtttttagcaactatttttcatatattttccagattgtgcgcaaaaaagaacaacatcccagttttgaacctgtctctactagaatgttgttttttttctaaaattattcatatttaaccaatgacctgatgattcagccattttttatttttcagacgaattgcatacataattccccgcaccgtccaatccgcaaacataccgatccacactgccatcggtcccattccaaatccacgtgcaagaatcatagaaagcatcaccctgcacaaccacatagaaagaacggatactgtcatggtgaacttgacatcccctgctgcacggaacccatacgcaggaatgaaggaaaacacccatgcaattggtttgacaacagtgatccaggtcaccacatggatacagagtcttgcactctctggttccattccaccgaattttgtaatcggataaacaaggatatacatgacaatgcaggaaatcacgattacaatttccgaaacaatgctcagcttcttcacataataaatcgcttcgtcttttcttcctgctccaagacattctccaacgactgtcatcaacccgacacccacgccgattgccagaattccattcagattttcaataatactggccataccctgtgctgcgatcgcagcggttcccatcaaagaaaccgtagactgaatggccagctttccaaactgaaacatactgttttcaatccctgaaggaattccgatatttaaaattctctgaatttctttccactgcggtcgaatcgtaaaatagtcatacaccggaatttccagctctggtttccgcagtcggtacatcacaacgatcattgcaaacattctcgcaagcatcgtcgcgcatgcagaacctgccaccccaagatgaagtccccatacaaaccatacattcaatacaatgttcacaatattggaacaaattgaaattttcatcggcagactgctgttttcctgggctcttaaaatacaagatccatcatcatataatgcaataaacgggtacgagattgccgaaaagaaaaaatatttctttgcatttatcataacactttcctcaacctcgccgaaaatcaatcccaaaatctgaccattaaaaatcagacagattgctccgatcatcactgacagacaaaatgtgataaaaataagctgtctcgccgcttcttttgcatgttctctttttttgcaccccaggtaatgagaacataccaccgtgcccccggatgccagtgcaaaaaacgcctgcacgatcagaatattgatggaatccaccagcgtcacagcggaaatagctgcggaacccagattgctgactaccagagtgtctacggtgcccataaaggaattcaacaactgatcaatcgcaagcggaatcagaagtgctgcaagtttcctgttatcaaataaatgcttttgtgtatccacctttttccccctctttgtttgcatcagttccatttggctaactatgtttttaggatacacctatattcgctattatgcaagaaaagagaataaatcttgcaaatttattctccctctgtctctatatcttctttgataaacatcaaaacaaaccctgccatcagcaatcctgctgcgatccagatcgtccgatcccccatctgtccactcaagactgctccgattgctgcacctatcgcaaaaatcaaaatcacaaaataataatgcagacttttctttttcagctcctgattgcctgtcacatgatatttgcagagcatttccgtcgcacttctcatatttccgatacacattgtcgtcgcacagggaataccgtgaaattttcggaatgcgttgacctgcattgcacagctaaacgacatcatcgcattggccgctacattcatactctgcggaaatacaccaaccagaaacaataaagcaatctggatcaacaaaacaatctgccgccaatggattttttcattttccttacacaaatactgaatgcgaactgccacatagactccgctgataaatgccagcaatggaatcagataatgcagagccccgctccagtttttctctgccagattctgccctaacaatacgatatttccagtctgggcattggcaaatacttttcccctgcaattatacgaatatgcatcctgcagcccgccggccaatgtcaaaaacactgccaacgtcatggattccgacatctgtcttttgattctcatattcagatacctcgttttttacaaagatctgatagacagcacctgtcacaatacggtgcggtccttgccgtacagatctctcttccatgatatacgaggcgatgacaaaagctgcttccctcttccggcggaatgatcttccacagttccatctccacctttttgggctctttgatcccgtctaccagccccatccggtttaccagacgaatgcagtgtgtatctgtcacaattgctggttttccaaacacatctcccatgatcagatttgcgcttttccttccgacccccggaagcttcagcaatgcatcaaaatcatccgggacttccccatgatattcatttctcaagattttcatacaggcactgatatctcttgctttactctttccaagcccgcagggacgtacaattgcttcgatctcctgcggatcagcttctgccagcgcattgacatccggaaatttggcatacaaatcttttacaaccacattgaccctctcatccgtacactgtgctgccagacgcacgcccacaagcagtttccaggcctcactatggtcataatcaagtgtacagtccgcatccggatatgccgtgcgaagccgctcgatgatttccagtgcgcgttgtttttttgtcatatataatcaactcctctttgctgtggtaatctttcatttttttcatatataatctgttttttatcatagcacaaaacagtcgacataccaacaggtacatcgactgttttgaaatagatttttctctattatcttacttgatcaatatagaacttaaatttatctgtacggtaatagcacttaaagttttcaattggaatctctttcccattcacaatgccatatgtcacacaacgaaacagcataatcggagatccttcttttatttccagatactctgcaatctcatctttagcaagaattgcttccattgtccttcttgcttttgtaatcttaactttgtatacattctgaatcgtctcatataaagactccttatcaaatgcatgtttctgtgtcaatccagaaaatatcttttctggaagaaatgtaagtgtataattcaaaggttctttatcggcatacaaaattcttccaatcatataaacattatcgtctgttgtaatctcaagtgcctttgcacgttttgcattcgcttttacaagttctgaaactacagttttcttgctcggtgtcatgcctaaacggattacatcttctgtacaacttgtgatcgcaaatagattgttgcttccttcatctgttttcacataagttccttttccctgcactttatacaggtaaccttcggcaaccaactcttcaattgcttttcgaatggtaatcctgctcacctgatactcttccattaattctcgttcactcggaataggctcacccaactgaaactcttcattatctattttttcaacaagcgatttttttacaagataatacttcggtaatctatcatctatcattattacacctactatcaactgtatccattttgttgatctttctctttttcttatactttcattatagtatgattgtatttgaaagacaaccctaacactgtgctttaaactctcggattttctctttcattgccggaatatcctcgtggagtttcaaaattgtacttcctacaaacgccgcatccccaccggcttcttttaccagcttcacatcttctggtgcatgaacacctactccacagtaaatcgggcgatcgataccacatgctctcaaatgctctacacagtcttttaatgtcggatatttttcattcttttcctgagtctcatatggttttgcctgaaggtatacaaatccattggactgttttgccatctcgatctctgcctccggcatatggaattgtacatagcaggatacctgaagtccggctgcgataatttcatctttgatcgtatcatccttcaaaccaaccagaagaatgtccttcagatcattttttaaacagaaatcaataaatttctttgttccgatttcttctactgtattttcgtacgccagtactaaaatcttaacgtccggtaattgatccttaatagctacgatagagtccatatatttttcataatcatcacaagattccaatgcttttgccattcttcctgcaatgtaatcactctccaaatatggatttctggatgggaaatctacttccatcattttacatccggcatctgcatattccattgccatattataacttgcttcaattgtcgggtatccgtttgataaataacaaataatttccatgtctattctcctctatatgctttcataaacaattctttaaatccttccacctctggaattaccggatttgtttttgtacatccatctgcttttgcaagtgcagccatctcatccagtttttctgtaaatgcagcttcatctgcgatcacttcttttaaacaagatggaatatgtaatgttcggttcaatgcttcaactgctgtatacaaattctctgcaccgattttttctgcgaacgtatcatatactttctttgctctttcatctgcttcattgtaacgaatgacatatggaagaagaattgcatctgcaagaccatgagaaatatggaatactccacccaacgtatgcgccatggaatgtacgatcccgagagaaacattggtaaatgccattcctgccaccattgatgcctgcagcatgatttctcttgctttcatatctgttccatctgcacaggcttttggaagattttccataatatcgattgctgcctgtgttgccagaatatcggatacatagtttgcccgattggatgccagagcttccagtgcatgtgtcaaagcgtccataccagtttctgctgtaatctttgcaggcatggaaaccgttacttccggatcacaaattgcaatatccggcatcatttccatatttccaagtccatgtttcagccctgtttcgttgtcagaaataacgatggatctggaaacctcacttgctgttccacttgtagatggaatgcagcagagtcttgctttttctctcagttttggaaactcatttggaggaagtacagattccattgtcttcaattccggatgctcatagaaaatccacattgcttttgcagcatccattgctgatcctccacctaaccctacgatcagatccggaccaaatccgagcatttcctgcgcccctctcattaccgtttcaaaagacggatctggctctacgccgctgatcaccattgtttctgcaccggcttcatggaaatatccttctacttttgcaagcattccgcttttttccatgctttttccgcctactacaatacttactttctctgctttgattgttttaatatattccaggcagccttctccaaacatcaattcagagcctgccagtttcattggtctcatcatgattcttctctccttttttatgcgtttaatccatctaatacttttttcacaagatcatatgaaatcgggttactgataatcccaccttctttgagactagatccgatgatcgcaccatctgcgatctgcagctgatctttgatattctctgctttcacaccacttcctgcaaacaccggcacttttactacattttttactcgcttgatcaggtccagcggtgtttcctccccgatctgcgttcctgttacaataattccatctgcaccgctgtccacagcttcttttgcagactgctctactgtaatatacggaagtaccatatgagcatgtttcacctgcacatctgccagaattttaatatcctcttttcccatagcttttcgatattccatacatttttttgcacatggattaataactccgtctgtaaagattaccgtatctacaaataccggaacacgaataaaggatgcccctgtaattgctgcaattgcaatattggcttcacaatcattaaatgctgcatcaactccaaccggaatgttcactgcattttttacagccaacgttgctgccgtcaaggctgccaactgcgctttattcagcagtgctgaaaatggagtgtcccccatattttctacgatcactgcatccactcctgctttttccagtgtgactgcatcttgtactgctctgtctaaaattttctgataatctccatcaaatccagctgttgtcggaagtggcagacagtgtaccattccaatcactgtttctgaaccaattgtaaatacttctttactcatttttttctccctccattttcatatgataatgatagattccttccagggctgttctgcaaagcagatcttccgcatctgttcgttcctgacctaccagtttttctttcagattttccagaaccgttaccatcgtcagaatacaggttttgactcccatcagtcttccaagagtcagcatacaggatgattccatatcaattcctgtcacacccagttttttcacttcctcaaatgtctcggacatatcccttccccactccagagaaaatctggaatcatgcatattgctgtagaatccgtccattgtacaattgagtccattcaaatatcgttttcccatcgttgtaaccgtttcattcattgcattgaccagatcgatatctgcaacagccggatagcttaaatctacataagactgactggtaccttcccttctcatcgcagcaatcggaatcagaaagtgtcccagcatatcatcctgcatcgacatgaccgttcccattctcacagccacttccattcctgcctcatacatttcttccattgcaatcgcagcagaaggtgcaccgattcctgtcgatgtgactgtcacttcaattcccttatacgttcctgtatacgtattaaattctctcataaatgctactttttttggattttccaaatattgttttacaacttccactctccacggatctccagaaaacaggacatattttgcaactgtttcctgatccgcgcccatatataatgtgctcatagctttttctccttttcaaaatatgaacgtttagatactactcaaatgtttttactttctccaataactgttcttctgtcggcgcatttgtgcagcatccttccgcctgaagaataaaataagaaagtgttcctccaagtctgcagcactcttccggtttatatccattgagatatccatagatgaaccctgccatataggcatctccggatcctgttgcatctaccacatgatctactttgcagattccgatcttttcctgacggatggtatctccttcccgaatgtaacagagacttccttcttttccgagtgttgtaacaatgatttctacttcaccaatatcaaacagctctgtaatatcttcaaaaccataaattttttcaataatttcccgctctacctcattggtaaaaataattctgctgcctgtcaaaagtctctttaaaaattcttccggaaatgcatcaaaatcatctttcattccaaatacgacgggaacatgatgtttctgacatttttcaaaaaattcctcattatcctgtctcgatgcaactgtgattactcccagttttgtatcttcaaacaaggtatccggaagcggttttgcatattttccatccattgcacccggataaaaaatggtaatgtggtcattgttattatcctggatcaaatagcagacactggttgcttcttccggaagttccgtaatcccatccagtggaacatttccatcttccagaaattttttaaacccattgctttcataatctccaccgacacgaagtaccggttttgcacacattcccaacttacacagtgcataggcaatattcacagaacatcccccgtaaaaaatctgtgcatttgactgattcgtaaccagagaagtaaatccgacctttgccggcgtatcaatcttaataatgtgatccatgctcacataaccacttgtcaacacatctgttttcattgccttcctcctataacgttccttcatccagcatcgtaaatagtgtattcatatccactacgtctcccagatatttatcaatgtctgtcagatgcacctcattgacaatgtctgaattcgttgctacacattcttttacaacatatggattgtagtctaaatagaatgcatctgttaccgttgcacgaatgcagcagtttgtcttagttcctacaatgatcacgttctctactttgttttcccgaagaaccaaatccagatctgttccaaaaaatccactgtatcttctcttctgaatgacatagtctttttcttcatctaccggaagcattggatcgatctccaccccaaaagttccttcgatgcagtttggccgcattgcctgagcttttctgtccacttttccttttcgattgcaatgctgcataaatacgatcagcacccctttttcccggcatttatccagtactttccgaatttgaggtaagatttctctgttttgtggataatagacgaggccttgcggatctgtgaaatcacgaaccatgtctacaatgatcaatgctgatttactcatgtttcacactcctattcaaatttatatcctctaacttttacatttttatatttcatgtaagataccactgcaagaacagcaaccataataatgtatggaatggtatcgaacattcctgctgccggacccgcatatacacttaagtttacagacagtgatcttgcaattccaaataagattgcatacagtgatgatgcgactggacgaccctgtccgcaatagattgctgcaattgcgataaatcctcgtcctgctgtcatatcattggtaaacatacacattctttccaatgacagattcacacctgcaagtgcacaacagaaggctccgattaaaactgctgcatatttgtatctttttgttttgattccaagactgattgcagagtcttcattttcacctaccacacgtacatacacaccaaatttcgttttaaacatcaagatagaaacaagtgcaatcccaataaatgccagatatgtaatcactggatggccgctgatgatatttccaagaatcggaatatcctgaatgattggaatattaatcttaaaatctgcaacactgacattctgaagactgatgttggcaagctccatcatctttaatacaaattttgcaatcgcaggaacaatcaagttgatacctaaaccaattacaattacatttcctttgcagctaatccctaaaacagaaaacaaaacgccccacagaagagttgtcacaattgcagctatgatcgcaattgctacacttcctgtcatatattccaccaggacagatacaaatgcaccgttcagcatcattccttctaacgcgatatttaatacatttgccttatatgcgaagattccaccgattacacagagaataataggcgcactgtgatacacggtatcatataaaatactatttaataattccattatgctgcctcctttttctctttcttgaatctgtcaaacaattttgtattgtttccaataaactttaccgcaaggaataaaatgatcattccctgaataattgcaatgatttcttttggtactgttgtatacaaattgatgctgtcacttcctgttttcaatgctgcatagaacactgccgctataaaaataccgattggagaatgacctcccaaaagagcaatcaacattccatcccaaccaagtccaggattggcagaaaaactaagtgtgtacttaaactggtcactcagcatccatcctgctccggcaattcccgcaagtgcaccgctgatcagcatcataacgataatttttcttcccacattcattcctgttgcttccgcaaactccgggttttttccaatggctgtaatttcatatcctaactttgatttgttcattaggaaatacataacaaccagaataatcattgcaatcacaaaaaacatcgtcattctggaggttcctattctctggaacattgcactgtcctgtaccgttggtgttgctacatacccagcacttttatcccggaaaatcccagtagtcaaaaattctaatgtctttgccattgcgtagttgagcatcaatgttacaaccatttcatttacattacattttgctttcaaaattgcgggaatcaatgcaaataacatgccgcaaagaattgcaactgcaaagcatactactttacttaaaagcgggttggaaattggaagatatgccccaacaattcctgcaaagaatccacccagaagcatttgtccttctactcccatgttgtagatgtttgctttaaatgtaatcgcaattgccaatcccgttaatatcaatggcgctgcataatgcaatgtattcatgaatcctttcgtcgaaagaagggattttcgaatcaaaattccatatgtttccaatggatcttctccaattgccagtatgatcactgcgccaatcacaaatgcaaggatgacaggaactacagagttcaagattgtttttattacattttcttttcttttcacgactctttcccccttaatttgaaattcctgccattaaaagaccaattgctgccgttgatacttcttttggacatacttccccagatatcttacccttgtacatgacaatcactcgatccgaaaggctcatgatttctgacaattcactggataccaaaattacggtatttccttcatcacggaatttcaaaatttgcttatgtataaactcaatggatccgatgtccacacctcttgttggctgacatgctaacaatactttgggatgtgcagacagttctcttgctatgataactttctgtgcatttcctccggaaagacttccgattggaccatttacatctcccaaacggatatcaaactcttgaataaaagaatctctcttttcgttgatttttttacgattatataaaccatgtttgcagatgtctttcgcaccgtgatatcctgcgatacagttgtctgatacactcatttcccgacaaagaccttgcgcatatcgatcttccggaataatgccaagacctgctttccgcaatttttcaggccaccagttcgtcacattctgtccgtcaaaaataatttcgcccttcgtagattccatcaatcccgtaattaatttcaccagttctgactgaccatttccctctacacctgcaactccaagaatctcgcctttgtgtactttaaacgatacgtccgatactacttcttttccataatcattgatcgttgtaagatgttttgcctcatacatgatgtctgtcttcagctgttcccggcgtgtattactcaccgtaagtaccacatctctgcccaccatcatctgcgcaagttcctgttcattcgtatccttcttcaagacattgccaatgacttttccctgcttgatcacagtgatgctgtctgcaagctccatcacttcacgaagtttgtgagtaatgacaataattgtttttccctgttttttcagctccttcaaagttaccatcagttcatcaacttcctgaggagttaatactgctgtcggctcatccaggattaagatatcgacatttcgataaagcattttgagaatctctactctctgtcttccgcctacagaaatgtcttctattttatctgtcgcatttaattcaaaatgattttctttgatcagcttttcaacacgtctgatttcttctttctgatcaacaaatggtgtttttacgtttccctttgttttattgatctctgctcccaataagatgttttcgtaaacagtcaggcttggcaccagcttaaaatgctggtgcaccatcccgattccgttcgcaatcgcatcgatcggactgttcataactacttcttttccacggattaaaatctttccgcttgttggctgaagcaatccatagagcatattcatcatggtagactttcccgcgccgttttcacctacaatacacttaatttcctgttcttttacatccagattgatccggtcattcgctgtaaagtccccaaatttctttgtcaaatcaatcgtttgtatcatactattcatcgcaatgctccttttctgacagagttcttatttgattgtcacatttggacagtctgccggatcaaatttttctccactctgtgcatttgttacctgaattgtaccatccgcaattttcttttcgatatcttcaagctctgttttgatttcatcccattttgcttttccgctttcctgtacatgtttgctgatctcgcttaaatctgtaatggaagctgctccagaagctaatgaataactctgtacacgatccatttcttcgatttttccttctacagcttctttcacaatttcatatactggtacttctgtatttttaattacacttgtcagaatatatcccggctgttgatcatctttatttgcatctacctgaattgcaagctttccttcttcttttgccttagaagctgctccgtctccaaccgaacctgctactgagaacacaacgtttgcaccctgattataataagttcctgctactgtgctgcccgttgcagaatctgcaaatcctgcatcatattttgcataataatcgtaatttactccaagtttttctgcttcgtagttgattccttccagatatccataagaaaatactgtgattccgtttgaatttgttcctccaataaatccaaccgatcttcccccattgtctgccggtgtaaagttatatccatctgttccaaacaacgtctctgcattctcgtttacaagagttgtcaatgctcctgcaacaaaagaagcctgatgaacatcaaataacacactaatcacattctcatgaattggtttgccactttcatcctggttcggattatcattgacacagacaaatgttgtttccggatacatctctgcaatcggagccgcaccaccggttccctgaatcaaagcctcaaagtcgtattccaggttgaaaatcacattgtatccatcgtctgcaagcgattccagtgcctgaggaactcctgttgttggttctactaccttatactctactcccaattcttctgcggcttttttcgctccatttactgcagattggttataaccattatcattttgtcccgccgatgaacaaatgatcgcaactttcacatcgctgcctttttcccctttttcagaatctccgccgcctccgcacgctgtaagacttcctaccatcaatgttccagccatcaacactcccaatactttcatccaacgctttttcattttctgttcctcctctaccttattgatcctaatgtcgtaatgttatgtcgtcataaccagttgttgattttataatacatcgaacttgatattttgtaaagactattgtttatttttgttcaaatacacaaagttacaattatttttttatgcattttatataattcaattttattttcatttctctacttgtcatataaaaaacaactgatctgtatatttacaaaccagttgtttttcatcaattttaatttttcttcttctcatcataccttctgctaacaacacactccattattttaggtcttttcaaaaccagtgagcagtgtataataaaacttaactgcaaccatcaaatttttacccggaatgaaaggaaaacttatgaatgcaattcaactgtcagatctgacaaagtattatgggaaatccagaggaatcttggatctgaatctggagatcaaagaaggcgaattctttggttttatcggtccaaacggcgccggaaaatcaaccacgatccgcaccatgctggggctgatttctccttcatccggacaggcaaagctctttgaaaccatagtcggacaaaatacttctgaactgctctcccgcattggctatctgccatctgaagctgttttttaccgtggaatgaaagtcaaggatctgttgaaattgtctgctgatcttcaaaagaaagactgctctgcggaaaggaaacgattatgcagccgtctgcagttgaatgtcaatcgtaaggtcgatgagttgtcttttggcaatcgaaaaaaagttgccatcgtatccgctcttcagcataaaccggaacttctgatcctggacgagccaaccagcggcctggatccattgatgcagcgggagtttttcaatataatccgagaacgtaatgaacagggagccactgtctttctctccagccacatcctctctgaaattcaacggaattgtacgagagctgcaattatccgggaaggaaagatcattgcctgcgaccgtgtagaagcactttccagaacaaacaccaagcggatcaccgtacagggaaaggtttctcttgtctctctgcagggaatccgtgatttgaaagaaaatgatggcgttaccagtttcctttacagtggagaaattcatcagcttcttaaaacactttctgacggagcagtgacagatctttccatttcagaccctaatctggacgagatttttctacattactacgaaaatggaggtacgcctgcatgattttattgaaacatgaattaaaacaaagctggaaatcactgacaatctggacttcctccattggttttttcattgttgtctgtgtgtttctatacccggaaatgaagggtgaaatgaaaaatataaatgagctctttgcgtctatgggagcatttaccgaggcctttggcatggatcgtctgaatttcggcactctgctcggattctattccacggaatgcggaaatgttttagggattggtggcgcatttttctcttccctgattggaatcaatattcttgcaaaagaagagaaagatcatactgctgaatttctctttgcacacccggtcagccgtgtaagggtgcttactgaaaaactgatttccatttttctccagatttttattttaaacctgatcgtgtttgccttatccattgcctctatcctgctcattggagaaaaattaccctggacagaactaagcctgatacaccttgctttcttcctggtccagggcgaattggcaggcatctgctttggcatttccgcttttctgcacagaggagggattggaatcggaattggaattgccacaaccatgtattttttaaatatcattgcaaatatttctgaatccgcagaatttctgaaatacatcacaccgttcggctacgccaacggagctgatattattgaaaacggccatcttgatctcggtatggtttcgattggtatgctgtttactgtcatcggaattcttgcagcgttctggaactatcgaaaaaaggacattcagatctgacaaaaagggcaggtcaaaatgaaaacagcaaagcgaacgactgtgacaattccaaccttgttatcaaccagataatacgcaataaaattatctgctggtagctggtacctgcccgtttccctgaatccataccgaaccttcagtaatctcaaactacggacggattccctgcttcatccagttatcataataagaaaatactgtctcttttaaaacctgtcccacattctcgcgttctaacttcaactcatcggttccattttgaagtttggtatgcgtaagtaattcttctagcatctctttcaagctcccaatcttctcctgaatgatctgaatataccgtttttttgtccaacacctctacagcatcctccaaaaagctgcaaaaaatccgaagttctactctgaaaacaaagcagacttcggatttttttataaaatactactcactccaaaaccatttttactgcaccgaacattcctgcatcatttccacaacttgccaatacaatatctgtcttttctgatgcatgaaacgccgcttctttataattttttcttatttcatcgaccagaatatttccggcttttgacacgccgcctccgatcacgaatacttctggatccagaatacatgagatacaggataatgcctgtcccagcttttctccgacaaaccgaacgacttttcgcgccagacgatccccttctttcgcagcatcaaacactgctttggccgtgatttcatcaatttgtctaagcatggaaggttctgttgtggtttttagtaattccctggttttccagacaattcccgttgcagaggcatactgttctaaatgtccttgttttccacatccacaaagacgcttctcatctttttccacccggatatgaccaatttcaccagccgctccgaatcttccggaaacaatctttccatccaggacgattccacctcccacacctgttccaagcgttaccatcactacatttttgcagccttttcctgctcctttccacatttctcccaaggccgccacattcgcatcatttcctactgcaatgttttggattcctgtcagctcttccataattttcccaacatgagttactccccatccaagattcacacattgattcacgattcctccttttaagatcggtcctggtacccccattccaattccctggatttccgccaaaacaatctgtttctcctcacatttcctttgaattgctaccgcaatatcttctaaaatatgcctgccgccctcagaagttcttgtttgtatttcccatttgtccaacagtaccccgcttgtttcaaataatccaatttttacagtagttcctccgatatcaacaccaaatgcatatcgtttcatcattctctgcctttctttagtcattctgattcatttttgcctgatgcgcttctctcttagcatccagatttgcctggatctgtgcattcttttctgcatctaatggatacagcgccaatgggatcagtgccaacaagtagcagattccgaacaccaggttcgttgcaagattgattcctttcattgcttctactgactgctgtgcatttgccacatatccaaaagcccccatgatcatcaacgccattgccggcccaaatgcatttcctacctttgtagaaagagaggttgctgcatatgccagaccatctgtacgaattccgactcgatcttcctgataattgattgcttccggtatcatggacattggaatcgggaaactgaagcagaagaaaccatacagggcatgcagagcaatcatcactgccatgttagacggatccagaaaatacatcaggatcaatgtaactcctgctcctgtatatccgattgctgttacttttttctttccccattttacaatataattttttgtaagaaggattccaataactgtcataatagaaggcagcgccataaatatactgatgtactgtggtttctgcattacataaataatatagtaaatgactacgcccatacggccaaaaaatgcaaacattgccaaaagctgtattccaaataccagcatcaatggtttatttgagacaaccgcctttaaactcatagaaagcggtaccctctgtccttcatttacgggttttactacttctttacaatttgcataaacgaagtaaaacattgggatggaacaagctgcatagataatgattgtgatcagatagcttttagcagtaaaggattctcctccggacaatgctcccataatcacaggagacagtgctgagagaacaaccgagcttaagtttgttcccatcattctccagcttgtaagctgagaaatatcttctggatttgttgtcataactgtagataaagaaccatatgacaaatttaccaccgtataaagcattccatacacaatatatgtaactgctgcatagatcgcaccaccttttcctcccatggtagtaaaagtcagaactgctgcaagtgccagaaacggagtgaaatagaagatatacggacgaaatcttcctttttttgtattggtccgttctgcaatcgctccaaacatcggatcattgatcgcatcccatacacgcgcgatcaccatgatcatggaaacaactgcaggtgccaatccgactacgtctgtgtaaaaaatagataaataacttcccataaatgtatttgtcaaattacttgcaaaatcaccgcatccatacgcaaacagtgtttttttgctgagtcttttgacaggatttgagcctttttccctcatcgttaatctcctttattacgtttgtatttatatttatttaatccccgagcaatgttctttccataatcatctgacgttttgtaaactctgttccaccacagtacagctcatcttcatattcacagattaaatatccattatacccttctttcgctaaaagaggaaggatatgattatatggaatacttgcttcatggcaggcttcatccaggtagtggaatttgccgtgacattcaaaactgtatggtaaaatttcttttaactcctgaagtaattgaggaaggtctttctcatcatgaaactgaacaaacccaaacattcctgccaaagcaggcataattgccggtgatgctccagcctccattactttttgggccgcctcttcctgacttacgccttctctgcgaagctgtgctgccatctgcagatgttcttcctttacccctgcctgaagagccttcatccactgcggcttattgggctgaacagaaaggaatccgaaatccggaacaaaaccaagatacttcgatcctgtttttttaatcacctcaagatatttctgcatagacggggatcccggggtctctggattatgaatttcaattccacagcgcacatcaaataattccgcatatggtgccagacgttcaaacgcctctggtgacatcatatactgtacccgcattaccttacagccaagtttatttgctgttttcagatcaatgatcgcatctgccagcatttcatcatctgtcagatttctgtcacaccgcattcctttatcattatttgctccatatgacactggaccaattccgtattttacttttaactcttcgatttttccaagaaactcatcacttacatttggataagaaggaagcatctgtgtccctacaatttcatatccttccgcacctgcaagtgctgcctgcctgacacactcttcaaagtcatattcaaatcttgcatattctgttccataacaaaataatgttgctccaagttttacactactcatttttcttcctccattccacttattccgctacctgaaccactacatgatcgccactgtcaagaggcataaaattatgatctggtccaatctgcatatatggaactcttaacatcagttttaattcgacttcatgctcccctgcttctactccgcctttcttgatcacgcggattttcgccggttccacctgactccagaattctgtcacagcatgcgtcagtttatacactggaagttctttcccttttatttcaaaggtaaccgcttcctgcggcattttttcgccatccagatacacttccaaaagatcaatatctgaaagataatgtcctctgtaatatgcaagctgtacgtcgaattcaaatccatttttccgcccattgatatataagtttttaaaagaattctttttaatgatttcagaattcagtttcattctcattgcaaatgccataattccacctcaatcttgatttcctgtattagaatttaatttctttgttttcttttgacgactgatagattgcatctaaaattcttgtaactgcaagtgcctcttctggttttacaagtggctgggtaccattttttactgcttccaaccactgacggcagtcaattgtaccttcttctccgccgcctccgccgaagtatgcaacaccgcctaccggagaaagtgtctcttccatcagctgaccattgcgtccacggttataaatcagttcattttttccgtaactcatacctgagtggatctctgcacctgccgctgttccgcacagtgttgtagaagcctccctggattccagaatattcagtgcccagcttgcttccaaattaattgtcgctccgtttttcattttaataaatcccatcgcagaatcttccacttcataagtatttggatcccatggtccaaacaggttgccttcggttgcctgctgaagagcacctagcttataaaagacagaaccgcttacactgtcaatatcatagttattcatacaccataaagtaatatccagtgcatgtgttccgatatcaataagaggacctcctccctgctgttctttatccatgaatacgccccatgtcggcactccacgtctgcggactgcatgcgcttttccgtaataaatttctccaagatctcctgcttcacatgctgcatgaaggttctgaacttccggacgaaaacggttctgatatccaactgtaaactgcattccggattgtttccatgcctccaccatcttcaacgcttcgatcggactatgtgacattggtttttcacagtatacgtgtttttttgctgcaaaagctgcaattgcaatttcactgtgtgatacatttggtgtacaaatatgtacgatttcaacttccggatcatttaacaggtcatgataatcctgataaacttttgctcctgctgcaccaaattcactacatgctttttctgctctttcaacaataatgtcacaaaatgctacgatttcattcaaatctgaattgttctttaatgccggaaaatgtttctgatttgcaattcctccacatcctacaattcctactttaattttactcataatcgattctccttttctttttcgctttttgcttgtttctggttatatcttaccgttttatatgctcttgtaccttacctcaacaaaccagaagcacccctgtatttgatgctctgaaatttctttttctcaaaaggtcaaaaatcatatataagattttaacctcctgtatcctgcaaatctcctggcaataaaaaatgccgggatcacgatgatatatcatcataatcccagcggatttttgaccttctattcaaatagtactgcttctcctgtattagaagacttccatgcagcctccatgacagacaggactctgcggacttctgaaatcttaatctttgattctgcttttttattcaacacatcatccacatttctataaaaatctacccagtctgtctcaatctcaggaagcttttcttccacaattcctcctggcggaaccggcgcaaactgtcttgttggccctgcttcagtttctgtaatctgcggaggaagtttctcaagcatttttcctgttctgtagattgctccatcacaaccaaatgtattcacaaccatcgttcctttgtcgcctgccgcaatccatcttggctgatactttaaaatatacgtcgataactcaatatgtgcagtaactccattgtccattttcagaataattttgaaataatcatcgacttcttcatgtaacacatttttgatatctgcatataccgatttgatttttgcatccggcatcataaacaaaatctggtcgatcagatgaacgccccagtcatagatcattcctccgccgtatttcttataaagatgccattcatgcatatatccgtttccggaatgcaattttgattctatggtaaagatattgccaagcattccttcgtcatatgctttttttacgatcagcatatctttatcccaccgtctgttttgatgtgatgtaaagaaaactcctgcttctttacatgctgcctccatctcgtctaactcctgtacattcagtgcggcaggtttttctgtgattacatttttacctgcttttgccgcttttacacacatttccttatgtaaataattaggaactgttaaaatgactgtatttacttctggatctttcaacagttcctctgctgtttgatacattttgaaccctgcatcaaccgcctccttttgtttgacttcatctatgtcacatactgctgcaatctcaacacctgctctcggtgcattttcggcatgccattttcccataccgccatatccgataattcctaattttattttcataacgctctcctttcaaaatctaaatcacgaaattacgtaaatatctgagactgagctgaacagcctttttcgcctgttctatacttccttcaaaagccttgtcctcaatttcaatacacgtataaccatcatatccgatatcagtcagtgcagaaacatattttccccaatctacatcacctaatcccggtaatttaggagtcataaactgcaacggagtagccatgacccctacatcttccagtttgtccggatatactttaatatccttataatgtacatggaaaattttatctctgaattcataaatcggacggatataatctatctgctgccagacaaaatgagaaggatcataattgattcctaaattatcatatggaaggatttcaaacacttttctccaatttgcaggcgtggtcatcaaattctgtccacccggccattcatcttctgtaaataacatcggacagttttcaattgcaattctaacgccttttgtctgtgcatattccaaaatcggaggccagacttttttaacctcttctaaattgtgggatacactttgattgggaattcttcccaaaaatgttgtaaccatattgacatccaataaagcggaagcatcgatcaatctataaaggtgttccacgtatgttcttctcttttcttcatccggatccagcatattggggtaataagccaaggcagagatatccactccctttactttcatatatgctttgatttcttctgccttttctgctgtcagattttctgtttttatgtggctgactcctgcatagcgcctttttgcccctcctgaagtcggccagcatgccacttccagacattccaatccactttccgctgcaaaatccacaacttcttttaaatccattccttcaaaaattgatgtgatcaatcctatcttcataacggttctccttcctaacctttgattgtttctgccttcattataacgatagagattgttctaaactatgtcatttattacaggtttctatgctttttttcactttctgcaaataaaaaaggtcaaaatatgatcattataaatgacctttttgacctttttctatcacttgcaattaatatcaagatatgcaatttcatttggcaacatagggatcttcaaacatatacttccattttctgattttattgtatgcatcgtcactttcggctcacatactcgctgaaaatagcgcaaatcctctcttgaaagatctgttgcatatcccatctctttccatactttttgaatagaaccattttcatcattgattctgtatattccatcggctatatctgtcaaattcagatttaattccagtggctctaaatcctcaaaatacttagaaaaatgttcctgatccaaacaatcctcttccacataataataattatatcccagtttcctgcaattgtgacatacaatcccataatttccatgcccatcttttgtcacaagataatgagagcctttccctacatattctgaataaagacggttcagaaaatggaatgcaaacattgcaggtttctgtattccatcttttgttaacaaacctgtaccgccaaacagcagctcttctgtgtcatagtactccgacacccggtcacttcccacaaaataagacattccttccacacgatcgatcaaatcgatataatttttcagaatataggcacccttaaagcaactgtcattgatcagatttctgtcactgatcgtaagattccattctgtaaaatatacatccagtctttctgctaattccggccagtcttgttccatattgtcaacgacatggctcataaactcaacatcggaactggggtgagacacatactttctgtcctgttcataactgtcataagcaaaagcatacaatgtcagaaaatctggaataatctcaaaagactgtaattttttataaaatgcacggatataaatggattttttttcatttgttttcgaatacccgtgcatcccgcatccgcctatctgtgcatctgtatatgtatgaataattttttttgcaattttaaatcgttctgcataatttaaaattctgatatcatctttgattctctccgcatcaaaccaaagttcaaatttccagtgtccaacttcttctcttccatatcgggataccacatgttttaaaaaaacttccaaaatactttcccagttttccaaggatgtaatatcttcaaaaagctcaaaaagcagagagcttgaagttgttttttccactcgttttggcttattctccaattcgataaacggataaatatcatgttccacaagaaaatctagaacggaatccaaacgggaaaaattatatttatgctccggattattgatatcgatcagcatctcttttgaaaatgcattccaaaatcgcacatatgtaaactttaaactatcttttagaagcatcacatgttcttgcacctctgaacggagcagatcttgtgcagaaccaatattgatgaccttctgccagattctgttcaatggttttgaaacagctgctgaaacttctccgcttatctttccgatatccgcatctgtcttctgcccactgtctttccaaagtacattttccagctttttttccatttctttcgtgatcgtatgttgttttgttttcttgtttccagcgcccctttttcttactgcagaaggcgtctccccatattcttttttaaatgctttgttaaaaagtgcaacacttgaaaatccgttatcatatacgatccgggtaatcggaatatctgtatacagaagttgatccactgcatgatgcagcctcacattcgtcaggtaatctgcaaagctcattccataatttttcttaaaaaatcgggataaataaccattggataaatacaatttttctgacagctctttcatactgattgctgatctgtaattggtccggatataattatcaatctgttgtattcttaactgatatttatcactttcttctttctccggcaaatctgaagactgtatcaaaaaatgcatgcaaatataatccataatctgataacataacgaaatatatgcaaaatctgtcacttttcctttattgctaagataatgtcccaaaagctgctgtagtaattttctaagaccgttgtaagctgcatctatatttcgtacagaatcacaaagaaacagcatattataattattcagaatatcactaagcaattcgtataatatggtaagtttgacatataaaacatcccccttactctttaaatagtgacgtttattggcattgatcataagcacgtcttcttccgacatcacgattttctgattatcgatatagacttccaattttccttccaaaagatacaataactctatatcctgatgaaaatgctctttttcttctttcgcttctgctatttccaataacaccttttcccgtcgttgaaattcgtccatgattttccctcctactgtattttttattgtatcatacttttctctcctttccctacaaaaagctaaaacaaatcaatcgtacaatcgcggaacctacgattcccccatctgcgacatttgccatgttccttgcctgttcaggtgtagagattccaaatccaatgacacatggtatatctgtattttcttttacaatggaatccaaattcgtcttgatctcacttctcatccctgtcactccaagactggaaacgatgtaaatgaactcttacgcttctttcgcaatcattgcaacccgattttccgacgtaggcgcgatcagggaaatcaaatccacaccatgtgcttagcaggataccaacatatccccggcaactgacgtatgccaacacgttgcagaatactctgagaaaaacttccatttgactgcaccctcagcggtccatttgacaacttgtttctcacctgactctcaatttccattttcctcttctgctttttatattactttccatccctcatgtcttttcttttttccatactgctgatatctgattcttccttcaaacaaacaaatcaccacgcatactgcaagaagtgcctgaagcaaataccatggattgcagattgttttgaataccatacatcctaataaagacaggacggccaaaacacccgcagctcgataaactctccttcccctcttatcaatatgtttgccaaacatcgccaccagtaagataccaataaatagtacagctccgcctgataaaacaggataaatcagcattattttatgatccagctccaatatcagttcaaaatatgttttacttgaaaaaagtaaatagtcccatgcactcaaatgaatgataaacaaagtaaaaacagctgaagccataacatatttttcttttttcatcaaagactgcattccaaaaaccagcagaattacccccagcattcccaacattgttgtccaatgaaatcccagattgaatctataaaccatatcttcaagttccttatcataatgcctcgggctactcatccacttttcactgatcagaaaaatagaggtcagaaacgcacctgcaatactcaaaataatatacattatattacgcaagcaaagaatattttttacattgtatttcattaatttattgtattcatttttcataaatttccgctcacctctatctgcttattttatcttctttctcctgcattacttcttcccataatttcaaaaactcatcctcttctatagaaaaaatccttatcccccttctgctgaacagcatactgaaatagcataagtacaagttttctacttttccaagcatacaaatgtattcgttctttttatagataaaacagagctcacctcactgccgtaatctgtttttccctttgatcgaatatcctgattttcacatcaccattataaattctttcaaattcctctttctttaaataaatttcatatctcatcattgactcttcctattttcctccgcaccacgaattggataggaataaattttatagtgataggaaagtaaagtgacgcatccgtcttactatttgctctgctgcgtctttacttcaatccacgtcctacgtaagtagaacgacggggagaatgcatcgaaagttgaccgatacttaaatttcaatccacgtcctacgtaagtagaacgacttaaaaaggtggtgagtcctatgacagaaaaacaatttcaatccacgtcctacgtaagtagaacgacggtatcgactggcaaaaggttctgccggatccggatttcaatccacgtcctacgtaagtagaacgacgatctgatgcttttgcgagcccaatcattttttgatttcaatccacgtcctacgtaagtagaacgacgtgcaaaatttattaaaaaagatcaatgaacaggaatttcaatccacgtcctacgtaagtagaacgacctccttctggtggatcatgctccgccattcctgcatttcaatccacgtcctacgtaagtagaacgacccttatgcaggacttaacccagccaacaggacaaatttcaatccacgtcctacgtaagtagaacgacccaagcaattccgcgcccttcattagaatcgttgatttcaatccacgtcctacgtaagtagaacgacggcaactttagccaaattataccctatatttcccaacactttcaccaattttttagttaaatttacctgaataccattttatctcacatatttctatctacacaacagcattctatgcacttttgcaggtgcgaattcccagcattttcctgtgtacttctcattcgcacctaccaccacactataagcatttattgcaaaatttcttttcaatatatcaggcttctttcttcctctttcgacccctttcaaattattgctgttccacatagattcattcccattctcactaccaaacacaaaatatggaatacattacaacggcaggcattcattttaccctatattttcatccccgcttttcatttaaaacttcaaaaaccatgctgaagttctagtactccatccatataccccagaaaagaatcataagaaagcgtccactggtaaacatcctccgcaatttgccgtattttccactcatttttcttattttcgtgaatagaaaccgaatacttctgaatatcctgccagcttccgttcccctgcttgatctcttctgccaaagattcatgaacaacaactgttatggtatcactctcaatcacacgaaacttcttatccactgtttgaaaactgcagctttcttctgcatcctgtaactcccgtattgctcctaaagacactcccctttccaactcattcacaatagctgtggtactcaattccggtgaaatcccatatccattctcaaaatattcctccagaacagatgcactcattgctactccttcattttttgtcaacatattgtcatcctgcatccggaaactccacatctgagcttctttcaattctccatttcgattcactcgccctgctgcctgcaatagcgatagtaaagatgccatttcgcgaaagcctgtgcgaaacgaaaaatccacacctgcttccacgcaggatgtcgccactaaaatccagtccgtatcttcctgattctccaatcgcattttcacaatttcgatcgttttttctcgatcttttggtaacaatgatgttgacaaatgttccactttctcccttccatatcctttacggatatcatcggcaattacagcagcactctgtattgtattcataatcaaaagtcggggacccggcatattcataacccagtcagtcaatcctttccggctttgaaaaaccggattccaacagaactgaattctatttttttcatatcccattaaatctctacgaacatttccagatatcatttccggaatttgttttattttagctccaaccaattcaggtatctcccaaaaccgaaccagtgagcctgaagccaatatccaactacaactccattcctcttccagcactttcatccaatgccaggcaagtggcataagctttaaaggcaatgccgcatgagcctcatccacaaagataacacttcccggcagttcatgaagacggcgcaaagtacttggacgattggaactgagcgtttcaaaaaatgcaaccgctgtcgtaatgataatcggagctctccaaagagtattcagatatcttgtatccttactctgaaagtcagctttagaatgtacttctgccacaacttcttctggattctctccctgcaataccaacgcttctctgtaaaccttcacagattgcgtaatgatattcgtatacggtaaaatcacaaaaatgtgacgtgcacctttttcaatagccctcctcagttgaaaggccatcactgccgtagttttcccagaaccaaccggtccgtcgtgagaaataattccttctttgaaaatacagttcttacattctttatacatcttcatccgaagttcatttcgtctgccttctccttttttctgaagcatttttacataatgatccaaagccttcagtcgaagatttggcaataattccggtatcttttccgctttcggaatctgtccataaacgcctgccgtatccgaatgatctgcatctaccatacaagaaaacaccatccgtataaatactggtaaatccccagtataatactccggtgtatgtacaaacctctccggaatcaaatttcgatggatctgaagcagtttctccagctccctatctgttatacacctgagttcctgctcttttgctcgatagcacgcatcctcagatctgattccttcttccgttaaattcggcagaccttgatgatgtgaatataccaacaataaagaacacattgcatccgttcctgtttgtttgataaatgctgcaccagcatctacatgattgaccggtaatttctgatttcgttctcctggttcatgtaacaccttctgattcttctcatttagctttccaagatcatgatattccattgcaaaccttaaaatattcacaatttggccttcatcctgcacacaatatttagccattttttttgccttatgcaaaaccttttcatcccctccaattacatgatccacataactttgggcagaatgtccattttttgcgctgtgtgctaaatactcttcattcatagagtcaccagatccactatgctgtccacttttccaagcaattcttctgggagtcctgtcttatcctgatagtcccgccaactttgagatggattcgatacatttccaattcgctccggtgtcagagcttccaacagcatatactccggacagcttcccaataaattcttgtgttcaatataccaggcatggcgcagacggacatccgggcgaattgctgatcgattcatatcatacgcatgaggaattaaaagcttcagcagctcaatatcttctactgtacacccactctttttcgcataattaggatttacgaaaaatggcatacaataaacaccatgttctaccacccggaacgccaatggtgccatacccccatttttattttcctgaacccctgctttgctggtatttgtctgtcgcacaatatcgatcggtgaaatcgatattcctacaccaaactgaacaacccccgtcttaatgtaacctttattcccttctttctctaaaaaggtatttccaaatactctggcatcccaatattttttcacaaactgactttctaaaaatttttcctgtgcgaactccgtcagattgcctttggaattcatttcctttttaatcgtattacggtctcgtccacgatgctctaaaatctgataatgttccgcattatccttaaatttttcaggaagattttgaaaaaaaggagatgtatgatcatctaataaatctcttaccttgcgtttaaatgaaactggagaaatttctccaagtccattcggtctctggcgcggttcagattcccgatccgggtctccattcgcattggaatttactacttcaattactaataaaccggttgctctctttatttcgcttgccatattcttttcctcctcataactttttacagattactcgttaaagtattctcctgattttcaattagcgtttcctcttgcttttgaaattttgctaaatatccaataaaatattgtgccttttcctcttcattgaagcgagtctgcccattccaaaccctatgaagttgggcagcaatatttccatataaagaaagacaccttcttacataccgactttcctcattttttatctcactgttctttaaaacgtaagtttttgcccatgtaatataaggattcattcgatctcccaacacccccagtgctttgtatggttgctctccacccataatatacattccacttcctgccaatgtgtttggaatagcattgttccgttcaattttgcagtatagctcatgcaatgtatcggatacctgtaacagctgacctaataaatatggaaattcttgcatatacttctcctttctgattccaagttgatacaaaaatagccccatcagtgctaatattttctgtgtctgccacaatatgatggattcagttgcatgataaggccgtctaaaaatccctgcttttcccaaatatgatgccaaatttgtcgtattccgtaccaataaaaacaaatctcgttgtacttcatttcttttcccatcaaataataattgtattccgtgatagcgtggaattggcctaaatttatctgtagccagttttccgtcccgtctccaaatctgatttaacacatcagaaatttctaaaggatataataccctgggctgaccaattaaaaatgtcggaatatttttacagcctgccgtccactgctcgctgcgctgctctatgtctcttggcgatatattgtatgtataaacaacctttgttcgggcattatccaatttccgcaaaacaaaatattgaatccgttctgacatagggtctgttccaggcttttttgtctttcttatctcttcaacaaacccttttgcagctgcctcaaatcctgccttacctccgctcttcccaactgtcttgttctctttctcttttttagcattactaggatgtttacaaaaattaacaaaactaaatttattctgtcgcaagacttccggatatgcaaacaatgcttcattcttatctgtgctgatccaggtaatctctttccgctcttcagcacttatccatgccagggctgcctgtaatttaaaacgcatctcttttgaaagcgggtaggttgcattttcgctccttccataacggctttgacagggctgcccgtgaaacatcgtcctgagagagacttcaaatcctgctgctaattttacagttggcatcggttctttaagaggtataaacatacctccaaacgcatctgcctccattttagcattgtcactctccattctttcattcgcctctattaactttttattcagagaactggtaaaattctctgtagcagttgaaaatccctcgtgaatcaattttctgctatccagcacaacagacaatgtgccgtaatcatcttctgcctttttttcttcttttcccaagtgaaacagaatctgcagtaaaaatcgaatctcggtttttcgctccaacaatgcaaacaccgtctcttgaagcatgttatgcagttgatcagcatccgaaaagacatccgtttcctctattaactgctgtaatggagaaaaagaaatctctgccctagaaaataatgctgtcatttcctgcggaattttctgcatactttttctatatttatttttaaacttctctccccaattattcgccctgcagagactgcgaatttctcccacatcaacttttgctattttcccatccatgaacttcaaaatcttcttcttttcagattcctctgtcaaacgatagagcggtgccagatttaatgcaggaaatgttccctgatttgttccatattttctgatatctgccgcctgctccgctgtaagacttctaattttatagatctgtccgttttctaaaacaatttggacacagggtgctttttttgtaaccttcggaatcagtttatacttcggatgtgtatgttctgcagcaatattggcctgttccaatgcctttgtcaattgataaagctcgttgatcatttaatacacctcctcacacggaaattccaagcgccctttgtgaatcctcaatgactgactgtaaacggcacgatatgaagagtgataaccatccggaaacacttcccttagcatagatggaatcacaatatctgaaagctctctacatacttctgtttctggacgaaatgggccataataagatggggtaaattccttccatcctaataccggaatggaaaaagactgccctttctttaaacgtcgattaaatatgtcctgataggcatgtcccggtgatgttgttttctcgtcccattccaatgcctttttcggaaaattctgtttaaaatgatttatctctacatttgcatagattctataacaaacatccaccagtaccgttgcataaagctgataattcatccccttttgtatggatttactcgccctcaacggtcccccataattcgtcacataagaatggtactgaattggtgcacaaatttctaccgcagttggaacaattctaatatccagcccccataaaatcgactcaaacatccctctaattgcagatggtgtaggaaccggataagataccggagaatctcctgaatccggccgactaaaaagtgcagtcgcccccgcaatctccattgcaattggatatcccttttgcttcatggtttttgcctccttccatataaaatgttcatccatttattatttgtatattatgctattacttttgcattaaaattacaatggatttttgcatttttcacaatacatatatgataaatttatatatttcttttatgcttcatcaattgtagattgtgatattaatttatttgttattccaaaaaatcattgctacaatccatcaggacttccatttcatcagaatttgttcttacaatgttctggcacagactttctgctgtttccaaaagcgtctggatgagggcatcctctttcgtgccataacagttgccaccgaagaatcttataaccaccttgagcaatcctctcctcaaatgtcggctcatagaagaaccgttctccatctggcagtgctcttaattgccgatgatgcagcccatccggttcatttgaagaagaaattatcagactgacagcctggtacacaatcccatccaataaatacgcaaatatgcggcatttctttattctttgtgtgcgtgatcgtacatcttttgaatatcctccggcagcttatccggcatcatgccgtgtacccgatcttcgttgccgtcctgcatggcttgttcataataccagcacttgaatttaatcatatccagcactttattcatatgttcaatttcagcttccactgttttccgctgtttctcaaacagctctttccgctgcggataggtggatgcaccctccgtacaccagtccataaactgcttgatatccttgatttccagccctgacttcttcaaacactcaatgacacgcaaagcctcaatctctcggccactgaatttgcggatgccggaaattctctccatccccggaaaaagtccctgtttgtcataatagcgcaaagtcgaaatcggaagtccaaacatttccgaaacctgtccaatcgtgtacatagatacctccacaaaaagttaataaatttattttttaaattctcttgacctaaagttaggtttaggttttatcattagtatagcagcgatacagaaagattgcaatgtctattcagaaatataggaggaatgattttatgtcagtacaacaaacagcgggaagaaaagaattgggaatatttgctcccaagtttgccgaactgaacgatgatgtattatttggcgaggtttggagcagagaagatcaactttctctgcgtgaccgttctcttgtgaccgtcatcgctctgatggcacagggacttaccgattctgctttctggttccatctggaaagtgcaaagaaaaatgggatcaccagggaggaaattgcagagatcttgacccatgccgctttttatgccgggtggccgaaagcgtgggcggcgttccgcattgcaaaggacgtgtggaatgaagaaaccggcaatgacgcaatggcaaaacacgctgcttctatggtattccctattggaaatcctaatgacggttttgcacagtattttagcggcaggagcttccttgcacctgtttccaaagaacaggttggcattttcaatgtgacctttgaaccgggatgccgcaacaactggcacattcatcatgccaagaatggcggtggtcagattctgatctgcgttgccggacgaggctattatcaggaatggggcaaagccgcagtcgagatgctgcccggcgatgtggtaaacatccctgttggtgtgaaacattggcatggtgcaactcccgatagctggttctctcacttagcagtagaagttcccggagaggaaacctctaataaatggctggaaaaagtaagtgataccgattacacccacgcaacaaagggagaaacattatgagaaaagttatgttattagtcggtgccggacagattggaatggcaattgcccgccgtgtcggtgccggattgaaaattattgcaggcgataaaaaagcaaaaaatgcagaaagcattaacagcagttacagactggcttgataaaattgaaatctttgataagaaataaggaggtattaccatcatggaaaaattaaacttaacacaagaatgggacaaagttttcccccaaagcaatcagattgaccataggaaaattacttttcataaccgctatggtattatgcttgcagcggatatgtatatcccgaaaaatacatccaacaaactccctgcaattgcaataagcggtccattcggtgcggtcaaggagcaatcctccggtctatatgctcaaaagatggcagagtacggatttttgaccattgcctttgacccgtcctttacaggcgaaagcggtggcaaacctcgttatgtggcttcgccggacatcaatacggaagatttctgtgcggctgtggattttctgtccgtacaagagaatgttgatacagacagaattggtatcatcggtatttgtggttggggcggcatggcgatcaacgcagctgcacaggacacccgtattaaagcaactgcggcaatgaccatgtacgatatgacccgtgtaaacgccaacggttattttgacagcgagaacacacccgaagctcgtttctctaagaaacaggcaatgaatgtccagcgtactgaggattataaaaatgacagttatgcccttgcaggcggtgtcgtcgatcctttgccggacgatgccccacagtttgtaaaagattattatgcttactacaaaaccgaacgtgggtatcatcctcgttctcttaattccaacaacggctggaatgtgacatcaagcctgtcctttataaatatgccgattttgcagtatgccgctgaaattcggtctgcggttctgttggtacatggagaaaaggcacattcccgttacttcagcgaaggcgcttatgaaaaattgatcggagataataaggaattgcttattattccgggagcaaaccatgttgatctttatgacaatttagaggtcattccttttgaaaagctgaacagctttttcagtgagcatctgaaataagcacaaaaaaatcattgtatggataaggaaaaaagaaacaggaagtatttatttatcaatggcagtccaaatccaaacggcaatactgatgttagaatataaataatacaaaataaacatgaccattttcaataaatagtatatgatagtcatagatcaaggaggagaatggttaagtaattcgccgtctgaatctatggccatattgtcagaaatggagaacgccatgtcgccatcgtcataatcaaaaaagttcttcattactcttttttctccttttccgacttggaaccctttactgctctgagcatatcttttctcaaagcttcaagttcttttttgtttctgatgcacattccatagcattgttcgttatatagacaagtttcgcaaataatcgcgttgattgactgtaacattaattcatcatcagaagggagttcatacttctcaattttctttatgttctccggatgacgaagcccaaaatcaatctgctttccgcttcctgtcttgatgtaacgatatggttcagcaaagaacgataagcagtctccaactgcatattgctcaagaccatgtttatcaatccaaacatggtcttccttaccatcaaagcaagtaccatcagggtacataccagaaacgtaaatacgtttaaagcaaactgcttttcctgtaatacgctcaatttgccccgtgaattctaacgggatataataatagcacgttgcaaaatcccagcgcactttgcctttgttttcacatgcagccatctgtaggtcaagatactcatcatatgttattttttctccacctactaagtctttttgtttgtctgggtcaaaattgataataccaccgtagacctgtaatccagtcttagaaccgtaataggctcttttggtttccaaccaatcttcccagctactccagttttcacttttgtccaagttaatcattgtttacctcctaataaaaagtactgccttatgacagtctgacattttatacaggtaaaactcagacataataccagaatcttaaccttatttatatcacaacagtcttatcaaaacaacttttcattcgtttcttctaatctattctgttatttaatcatttcaagtgtgatttcttcagtgttaacaatcttatcttctaatacatttgcgtcatctgcaattctaataattggattatcatggcagattcatatcaggcattttccgtttctttgtcatggtgcaccacctctttctttcgttccacatagtcctgaaggaaggcaattttgccctccttctttagctcatctaccacgataactcgttcctccaaagaacctgcggtcaaaatatctgtcagatattcaatataatcgagcatctgacaggcttccacaaagtggtcatcccattcatccactggtgtcttgggtgcgtagcgtagcttccaatcctccaaaagatgcaggtaatccgtcaacacccgaaagcagagcatttcatcctcccgaaactgttggatataaggatgctttggcttcggcaaggcattggcagaaggtggtttcggatcaatcccaaaatccgcagccagcttctgggccgcttcataattacttaggttgaataaccttgccacaaagtcgatcacatcccctttgactccacaaccgaagcagaaaaaataatcctcgttcagttttaggctcggatgccggtcattgtggaacgggcagcaagccataccgttgcggttgactttcaacccattggtcctatgtcaagaaaaagtacaaattaaatgtaaccaattttctctgttcttagcgaagtctaacttgctatttttactacattctcctcgatgttttcaagatattgttcctcatattcatttggagacaaatatccacagtggctgtgaatgcgcaccgtattgtaaaatgtttcgatgtattcaaaaatcaatttatgtgcatgtgcataattaaagattttaaaccgattgatccattctctcttcaagagtgcatggaaagattcgatacaggcgttatcccatggatatgccttctttgaataactgtgaatcataccttttgttgctttttgaaatgcttccgatacgtactggcatcctctgtcgcagtggaagatcaacggtttttcaacatttctgacacgttttgctttttcaacgcattccactacgtgggatgcttccaacgtctcactcaacacccaggaaatgatttttcttgaatacagatccatcacactggtaagatatacaaatccttcaaatatccaaatataagtgatatctgaacaccagacagcatctggatgagagggattaaattcctcattgaggatatttttaaggttctggctgaaatcagaatctatggttgtctggatatatggtttcacccagtgggctttgattcccatttgacgcatataatttccaactgttttttcggaaacagattccccagattttcgtaattctgcagtaattttaggagcgccgtagttttggtgggattcctcgtagatcttttgaattttttcttttaaaactgcacggcgaacagacgtgtccgaaggagctcgtttcttccatgcattgtaacccgaacgtgaaacgcctaattttttcagtattccgctgacagaaacctgacgtttcacgtgcagggatttgatttctttcacgtactcagaagtagccgtgtaaagagcttttgtcagtttcccagaataccgattgctttttttaatacttcaagagcatccttcgtatctcgtaattcacgttgcaatctggcaatctctttcgtttcctcacttgcataatttccagaaccacgggtagggacctcgcctttatgctcctttgctgctttcatccagtttttcagtgcagattcgctaattccaatgttctccgcagccttgcgaagtggtagctccggatgttccaggcgatactgtaccgcatcctctttaaactgtttggaatattttgtaccttttgccataaccattctcctccttgatctatgactatcatatactatttattgaaaatggtcatgtttattttgtactatttatattctaacatcaagtatatatacatatattttccttgatatagcacctaaactgtaagaatgcagttcgacactactacttgaaaaacacaaaaccgctacaacttccatcctacacagcggatgtgaattgtagcggttttcttaaaatttactttatgattcgtgcaattttttattcatctatagcaaccaagatgctggataatattttttaagattctcctgactgatttgtcccttcatgttttctgtatctttcttaaatttgtcaaaccaatcttgcatttgatttgtgaaaaaaaaacagacgagtccaaacttatttgaattttattagagtatataatggtctctatttgcgctaccaatgttgaatttaactcacatgacggttataatggttcatgtaggttgaccataggagaaacaagatggaaaatgattttgctttagtgaaagctaagtttatcgaaaactataatcttgccagaccaattatgacaattttaggcgatgaagtacggcaggagatcttattgactctcattgaggctggaggaatgggcggtattcgagttggagatattcaaaagaaaagccatgtttcccgatcagcagtatcccatcaccttaaagtattactggatgcaggcattatctgtatgcggcgggaaggaacgaagaattactattacattgactttaatgactcaacggttaagccagttattttattttggcaacaagttgaacctatgttaaagcgttgcattaaagaacgagaaaggcggctataaacatgaaagtatgtgctatttattttagtccgacaggcagtacggaaaaaatcgtgaaagtgattgcaaatgaatttggagactatcaggaatttgatttaagtaaacgagaaaataatgttcagcagaccttcgcacaagatgatctttgcgtgattggcgttccctcctacggcggcagagttccgtctgctgccttggaacggatgaaagagttccgggggaacaacaccaaagcagtattgatcgtatcttatggcaaccgggcttatgacgatactgtcagagagcttgcagagtttgttgaaaataaaggtttctgctgtgtggcagcaatcgcagcggttgcagaacactccattatgcaccaatttgcaacagggcgcccagacaaatcggatcaaaaagaactggcgcagtttgcgaaaaagatcctggacaaaataaacagcggagcagcctgtgaaaaattgaatgtacctggcaatttcccctatcgggagtataagggcgttcccttaaaaccaaaggccggaggaaaatgcacgagctgtggtctttgtgcgaacttatgcccggttggggctattccgttggacaatcccaaaaagacagacaaaaacctatgtatatcctgtatgagatgtatcaatatctgtcccaataacgcccggaaagtcaattctcttatggtaaaagtcgcatctaagaaaatggaagcggcttgtggggagaaaaagaaaaacgaactctttatttgatactaatggcacaataaaatgccccgaagcagcttgctatttgctgacttcgagggcatttttattagttcaactttttatactgagctacagctttcagataagtctctggatcaccattcagtatcagatcggcatatccaaccgggtcattgtaaatcatataatccagttctaaccgctgatacatattgtcggcaatctcgttctccacggcaatggtgtcaatggcaatcatgctgccgtctgaaaatttcagctccacacaggcattatccatgttgaactcacaaaaaatcaatctatccataagaaacctccaaaatgcaggatgttagatcatcccaaaatatttcaacgcttctcggattgctttctctttttccggcggacactggggctgtctggaatcctccgatttcggcaggttgtagtttttgcccacttccagcccacattttctctttatctgagagatatataggttggatacttttaatccgctatgctccagcacatagtccttgatctgggtgtaggttgccccatcctgaaattcggacatatccatatcttccaaagagaactcaacccgaatctttttcgagtcgacctcacccttggaaagcaagacaaccgtctcaacatgcacactctgcggaaattgatccactgccctcacctttatcatctcatatccattcccgcacagatacttcagatcccgtgccagagttgcagaatcacagctcacatacacgatccgttccggctgcatccgtaccatcgtctcaagcagagattcctcacagccctttcgcggaggatccactacgatcacatccgcatgtgcctgctcgcccggatgtgcctttgcataatctgcataatatccaggcaggacttcttctgccttcccgacataaaacgcagcattttcaattccattgatctgtgcattttttctggcatcctggattgcctgaggaataatttccacaccataaacctgtttcgctttctgtgccagaaaaagagaaatggttccgattccacagtagagatcccagactgtttcctccccttttaagtccgcgtactccagtgcaagtccatacaacttttctgtctgcaccggattgacctgataaaaggacagcggagaaatctgatagttaatctcaccgatagaatctgtaataaacgcctgtccccatagaacttcataagaatctcccatgatcacattggtatttttccgattcacactcatggtaatacttgtcattccatctgtttttctcaacatttctatcagcttttcactgtgtggaatcttcgtcccattgatcaccaggcagaccataatctctttggttgtaaatccataccggatcagaacgtgacgaagcaagcctcttcctgttttttcatcatatggctcaatctgatattgattcataaatgccagaatcgtctcaaggatctcctgattcttgtctatccccaatgcacagtctgtattcgcaatgatatcatgcgtgcggcctgcataaaatccagttaccgttgtgccgtttttatcttttccaaacgggaactgtgccttgttccgataataaaacggttctttcattcccacgatcggatctgcaattttctccagcaattccggtgaaaatccaccgattcgctccagatttcccagtacttttctatgcttaaactccaactgtttttcataagaaatctgctggatctgacatcctccgcactgtctggcaaatttgcacttcggctctactctgtccttggacggttcgatgatctgcatcagccttgcgtatccataatttttcttggctttcatgatctttgcttctaccacatccccgatcaccgcatctttgataaacagtgtataaccatccacttttccgattccttccccgtttaccccaatgtcttctatcattacctttactacatcattcttctgcatatgctttctcccttatctgaaaaaagagggcgcacaaaacttcttgtgatcaccctcttttgtttctctgtctctagatcgaacttcttctcaggtttgtctcaaacatccggttgtaacccagccagtcatttcccggtttattcttaaaaatctctgtcagagtctgcatcttggcatctgcattatctgccaggttcagtgccattgcctctgcaagcgccggctttttcggcgaaccatattcaagttccccatgatgagaaatgatacaatgcttcaattcactgccaagcttctccggaaatcccggaatctcccggatcgcatcattcatcatctcaactccaatgataatatgtccaaggagctggccgtcatctgtatagtcattatccggaaatgcagaaagttcttttgtcttcccaatatcatggcacattgccgctgcataaagaagatctctgttcaaaatctcatacgtatctgcaaaataccgacacatctttacaacacttaatgtatgctccagaagacctcccgcgaatccatgatgtacagtcttcgctgcagaatgccctttaaatacacgtacaaattctgcatcttttacaaaataatattccaaaagctgtcgaagccatggatttgaaattccacgaataaatccaagaagttcttcatacatcccatcaacacttttctcggaagtcggcatataatccgccggattgtattcgccctcctccgcttttctgatctgacggatattcagctgtaggcttccattgtaactgatcacgtcaccaaacacttcaataaaatccttttcatcataatctgcaattccctgtgaatttggatcccatacttttccatccagtgttcctgttttatcctgcaggatcagactatcaaaaggcttcccgtttcttgtctctgcagaacgctttcctttgcacaagtatacgtttctgatagtctcgccttcatgtaaatcattgatatatctcataataattttgtttcctctctatttttgctattctttactcacggctgtctaatgtcagctgaaacgaaatctccacatatccgcctgcacccagacgttttccctgaagccggatcgtctctcctgctttgcaattgcggagtactttttcatactgaaccatagaggcgatcttctctccatccacagactggatcacatcaccactctgaattcctgccgccattgcaggtgaatctgcctgcacctgcgtcacatacatcccggatggaatctgtttcgactctgaaatatcactgctgaccgtcactccataaatcccggcataaggtacgggctgaccgtttaaaagtgactccatgatcggttttaaatccgaaataccatatgcattcgccgtatttccctgattttctgtccagatttctgaatcgatcagtccaataatctcgccattcagattacacagcacgctggaactgtgcccggctgacggaatatctgtggcaagcacactaaatgtatgatccggaattgttttttcatgtatattcgaactgatgataccatatccaattccatttgtatatccgaatgtatctccaagcgcaatcaccgcttctccttcggtcattacattcgagttaccaagtgttgctgttgtgatcgcatcccaggtactttctgaaatcagctctctcttgacagcaaacacagccagacgactgttcttgtcctgttttttcaatgatgcttcacaaatacttccatctgaaaactgtatattccagattgtagattctgcacaaagagaattgttgctcaaaatcaaaagctctcgcccgttatctgccgcaatcaatcctgtacatcccacatcttcactgtcaacatccttggtaagatttgccgtatcctgttttccccggatgataactacactttttctggtctctacagcaacctgatagatgctctgcatcatcgtctcaaactcttcgattcccagatcttcatcctgctcttcctgtaactgtgcttcttccgattccttctgcatatcttcagtgtcttccggaatggtcacagtctttggagattctggaaacaacttctgtacccatggcttcagggcataaaaacccaggcaggcaaacataccaaccacaattccatagacagccagtttaagaagctgccttctcacctgttttccggtgatcggttccggcttgatcgtctcctgcaaaaaagaaaaattatcctcttttggctcttcattcaagtctttgggggactttccttttgggtcttcattccacggcatcattgttaatctcctctgctgtatagtataaccgattcccctggattgttcaatatttatccttttcattcccatgtaaataaggtaaaatgtagctatgagttcgaaatgataaaaggtgaaaattatgaatcaaaaaacattaacaaaattggaatattataaaattaccgcacttctggaagaacaggcttcttctatgcgcgggaaacaactttgccgaaaactaaaacctatgacagacctggaaaagatcaacactgctcaggaacagacagaagcagcatttacacggattgtgaaaaagggacgcatctcttttggcaatgcatttccgatcggtgagtctttaaaacggctggagatcggcggtgcactgggatgtggggaactgcttcgcatttgcaaagtcctgcaaaatgccggcaaagtaaaagcttacggacgtcatgacacacaagacgaactggctgactgtctggatacttattttgaacagctggaaccgctctttcccctgacagccgagattgaacgctgtatccagggtgaggatgagatcagtgatgacgccagcagtacattaaagaacatccgccgcagcattggacacatcaacgacaaagtccatgccacgctgaccaacctggtcaatggttctttgcgtacttatctgcaggatcccatcatcaccatgcgtggagaccgctactgtgttccggtcaaagccgaataccgcagtcaggtcaatggaatgatccacgaccagtcctccaccggttccacactatttattgaaccaatggcagttgtaaaactgaacaatgatctcaaagagctctacgcaaaagaacaggaagagattcaagtgatccttgcacgtctcagtgaagagactgcacaatatatcgaagagatccgcacagattaccgtattctgacagatctggattttatctttgcacgcggtgcactcgccctctccatgaatggaagccggccgattcttaatacagacggccgcattcacatccgggagggaagacatcctcttctggatccgaaaaaggtagttccgatcactgtttctctgggagatgatttttccctgttgatcatcaccggaccgaataccggcggaaaaactgtctccctgaagacagtcggtctttttacattaatgggacagtccggtcttcacattccggcgcgcgaccgctcagaacttgcagtattcaggcaggtatacgcagatatcggagacgaacagagtattgaacagagcttaagtacgttctcttctcatatgacaaatatcgtttcttttcttcaggatgtagatgaacattctctggtcctgtttgatgaactgggtgccggaacagacccaacggaaggagctgcactggcaatcgcaattctctcttacctgcatggaaggggaatacgtaccatggcaactacgcattacagtgaactgaaagtttacgcgctttctactccaggagttgaaaatgcctgctgtgaatttgacgtggaaagccttcgtcccacataccgtctgctgatcggtatccctggaaaaagtaatgcatttgctatttctggaaagctcggccttccggattatattatcgaagatgccaaagcaagacttacagaacaagatgtttcctttgaagacctgatctctgatctggagataagtaagcgcacgattgaaaaagaacaggaagagattgctgtctataaaaaagagatcgaaacgctaaaaagtcaggcgcagcaaaaacaggaacggattgaagaacaaagagagcggattcttgccgaagcccgcgaaaaggcaaatgcgattctgcgtgacgccaaagaagtcgcagatgaaaccatcaaaaatttccataaattcggaaaagaaaatatctctgcctctgaaatggaaaaagaacgggaacgtcttcgccaaaaaataaaagagaataccgcatcttcttccttaaaagtgcagaaaccaaaaaaagcatataagccaggtgatttcaaactcggcgaatctgtaaaagtactgagtatgaatctgaccggaaccatcagttctcttccagattcccgtggaaatgtgaccgtacagatgggcattttacgatctcaggttcctatttctgatctggagatcatcgaagaggcaaacccctatgcgccaaaatccttcaagcgcacctccaaaggcaagctgaaaatgagcaaatcgctttccgtaagtccggagatcaacctgctcggaaaaacggtagacgaagccgtttctgaattggataaatatctggatgatgcgcttttatcgcatttaaataccgtaagagtcgtacacggaaagggtaccggagccctcagaaagggaatccacgaatttttacgccggcaaaaacatgtcaaatcttatcgtctcggggaattcggtgagggtgatgccggtgttacgattgttgaattaaaataaggggtttatacgagaggagtatttatgatttcaaaacagaaaattttaattgtagacgatgacgaaaatatcgcagagctgatctcgctctatttgatcaaagagtgtttcgacacaaagatcgtatccaatggagaggatgcgctgtctgcctttgagacttaccagcccaacctgattctcctcgacttgatgctgccgggaatcgacggttatcaggtctgccgggagctgcgcgccaaatctcaggtaccgatcatcatgctctccgccaaaggagaggtttttgataaagtgcttggactggagctgggtgcagatgattatattatgaaaccatttgactccaaagaaatggttgcaagagtgcgtgcagttctgcgtcgttatcagcctgccaaaccagaagtatctgctgcagaaaaaacaaaatgtgtggaatacgacggacttaccatcaatcttacaaattattctgtcctgtgcgatggccagaatattgacatgccgccaaaagaactggagcttttatactttctggctgcttctccaaatcaggtatttacaagagaacagcttttagaccagatctgggggtatgaatatatcggggatacccgcactgtagatgtacatatcaaacggctccgggaaaagatcaaagatcatccgggatggggactcagcactgtatggggaataggctacaaatttgaaacaaaataaacagatgcatggaaaagaggattactatgaaaagtacattgcgcttaaaatttatcatactgtatatcattttcggattcctcagcattttcacagtttcccttttgtccaatcagcttcttctcaacaaactggaagaagactcttcccagaatatgtaccggattgcaaatcagacagcaacttcctatcttccggcatatttttccaatgatctttcttcctggtctgttcactcacagctgaaggccatgcagctctatctggactcctccatctggttcgtcaaagcagacggtacactgatcacctctgcaccactggatggaaccgatgtccccgaacagatcctggattttgatcctgccgagattggaaataatcagtttatctccggaaattatcacgaatacttcaaagaggatgtaatcactgtaatggcacccgtcacccaggatttctccgtacagggctatcttttgatccatcgtcccattgaaaccctggaagagacttgccattctctgattctccctgtgttcattactatggctgtgatctatcttttgtcatttctctttctgatcggctttgaatttttcgtattccgtccgctcagtcagatcacggaagcggcaacacagtatgcatccgggaatctcacctatgagattcccgtgacaacccatgatgagatgggatatctttcggcatctttgaattacatgtcatcccagttaaaggatatggaggaatatcagaaaaaaatcgtagccaatgtttcccatgactttcgatctcctctgacttccatcaaaggatatgtacaggctatgacggacggcacgattcctccccaactgcatcagaaatatctgaatatcattctgtttgaaacagaacgactgacagatctgactcaagatctcctgactttaaatgaattcgaccgaaatgaaatgatactggataaaacagaatttgacatccaacaaatgatcaaaaatactgcagcatcctttgaaggaacctgtacaagcaagcggatttccatagaacttctgcttcttgccggcaatattcttgtctatgcagaccgtcggaagattcagcaagtgctgtacaacctgattgacaacgcaatcaagttcagtggaaatgactcttcgatcacaattgaagtaacagaaaaaaatgacaaaattttcatttctgtaaaggataccgggatgggaattcctaaaaaagaactcaataaaatctgggaacggttttacaaatctgatctttcccgtggaaaagataaaaagggaacagggcttggacttgccattgtaaaagaggcgattcaggctcatgatgaacacatcaatgtcatcagtacggaaggtgtcggcacggaatttatcttttctctgacaaaagtgtaagcatataaagtaactcaaaagaaacagggccgtttccctgtttctttgtttttccatctattgataaagcatatttttgatagacgtctcttctatattttcttttgtcacccatacatatcctgtgtctacaaaagcttcgtttcctgtctgaagaatgcttctggctgcagccactacggatgcatatccaatcccaaatggattctgtactgccagcccttcaatttctccattctttaatgcttcaatttgttcctctcctgcatcaaatcctgttaaaatgacatcttctgttttctctgcttcccggagagctgacagccccaactgaactgccgtaacatttgtcccaaacatacctttcagatttggatactgttccatataatacaaaatcacatcttcatcactgagttcctcaactgtaagcggagtttctcctgatttcttttgtgcattctttttctctacaatctctttcttcagatcgtctatctcatcacagtaaatcgtatctacaattttcacatttgggtgttcatttttgatctcttcctgaaatcctgccagtctctcctttgccgcttctgaattgctgtcaacagccagaagaaggacctctccctcgtcctcaattccattgcacaactgatatgccgctgttttggatgcttctgtgttgtttgtcttaaccgtacactgtatgccctgatacgtatttccggaatccaaagcaatcaccgggatcccattctctgctgccgcatcaaactgtactttacatgcgtcctcatcaatacttgcaatccctactgcatctgggtatcgtgccaactcttcatccagaatattcacctgttcatcaatattttctccatccggcgcattgaatgtaactttaatcttatcttctccactatacccaagcatcttgttcagatcctttaccgcctgctctacccccttttttacttctttccagtatgaggcattctcgtctttcccgattatggatatataagtccctggttccagagtcagaccttgtacattactataagccgatggtgtcacaaaatccaaatttgcctggtaggaaggaacttctgtcttatctcctgtaaatgtgggagtctcttcctttttactgcaggcactcattgccaatgcaacacataaaattgacggtattactattcttaatctctttatcatatctaaaacctccagtattaactgtcttttcaccattcccatccgggcatcccgcaactcatgccttcgacgggcggacttcgtccgataatgtatacccatccgggcatcccgcaactcatgccttcggcgggcggacttcgtccgataatgtatactatacacgatttctgtgaaaaaaaaagaaagaatttcttaatttttgaaaaattttatacttcttacattctaaattgcatttaattttaaccataaattcatatggataatgcttgtatattttccacaattgtattagaatatttgtaacggtaacggcaatcctttatcgtaattccaaagaaggaggatacatattatggcacacgtaattagtgatgaatgtgtaagctgtggttcttgcgaaggcgaatgtccagtaggagctatctccgaaggcgatggcaaatacgaaatcgatgctgatgcttgcgttgactgcggagcatgtgaagctgcttgtcctacaggcgctatttcagcagagtaatttttaatatttgcaagtgatcacaagcatgaaaagagcattttggacttctggttcaggatgctctttttcatattcttaagatctctgctgctctgaccggtcgctttctgacacaatttgacgaacggtttctaaggcgtttttcatcccctcatgctataataataccgaaaacagttcataggaggtatattttaatgggcgaggtcagatttatgatttctgaagctgcaaagcaggttcatgtagaatctcatgttctacgttactgggaggaagagctcgaacttgtgatcggacgtacagaaatgggacatcgatattataccgaagatgatatacaactcttttgctgtattaaaaaactaaaagatgccggaatgcttttaaaagacttaaagcctctcattccggaattaaaatcaaccaaactaaaacttcaaaaaacagaggcactgaaaaaggccgcattgaaaaaggaggcttccgcatcttccgtttcaacttcggttcccgccccggtttctgtccaggtacccgcaaaagttccgactttaaacgaggtctctgctgctgaagttgttccggttacacaattggagcaggtccgttctttcattggagatgtgctcaccgaagtagtcgtttccaacaacgaggcattaaaaaaagacatcagcaagtctgtaactactgatgtcatacgagaaatggattttctcttccaggcgaaagaacggcaggaagaagagcatttccgcaaactggacacattgatccgccagcagcaggcgagccgcaaagaagctgcccgcgaacatccgctgggaaaactaaaaagtatgttcaatcactgctgatcctgacgaagctcattaccaaaacgggtatactgcggcatccatgccagtctgacggttccaaccggaccgtttctctgttttgcaatgatgatctccgcaatatttttgtcttctgtatcaggaatataataatcttcacgatagataaacatacagacatcggcatcctgctcgatggctccagactcacgaaggtcggaaagcatcgggcgtttgtccgttctctgttctaccgcacgactcaactgagaaagtgcaattaccggcacattcaactctcttgccagcccttttaaggaacgggaaatttctgaaatctcctgctgacggctttcattgcttcttccaccacttccactcatcaactgcaaatagtcgatgatgatcaagtccagtccatgttccagcttatactttcggcacttcgagcgcatttccgtaatggagataccagaagtatcatcgatgatcagtttcgattttccgatcgtacctgcgccttcgatcagtttttcccaatctgtatctttgagatttccggttcgaagaacctgtgcatccacatgagcttccaaagaaaacaaacgatttaccaactgttctttggacatctcaaggctaaaaatagcaaccgccttttcctgacggaaagccacatgctgcgcaatattcaatacaaatgcggtctttcccatagaaggacgggctgccaccagaatcagatctgaacgctgcagaccagaaagcttataatccaaatcaataaatccggtcgggattccggttacagtgccttttgtcttggatgctttctcgatcacttccaaagcatttaacacaacctgcttgatcggcgtatattcctgactgtttccatgctgtgccaactcaaaaatccgcttttctgccgcatccatgatcacatcaagaggctggttctccaaatagcagttgtttgcaatctcctcattgatcttaatcatcttccgaaatgttgccttttcccgaacgatctctgcgtaagatttgatattcgccgaggtctgagcattcagcaaaagttctcttgcaaactccagtccactgatctccggcggcgcatttttttctttcaaatgctcctgtaacgtaatcagatccactggttttccagactgaaacaattctaccatagcatcgaacaaaactccgtatgcactctgatagaaatcttctcctgtaagcatctcagctgcgaccatgattgcatctttatccatcagcatagctcccacgactgcctgttctgcttctgtgctgtggggcaatattcgtttaatcgctgcttccatagaatccaactactccttatgcttctttcacggaaacgttcagctctgctgtcacttccggatgtaattttacagatacaatgtgcgttcccagtgttttgatctgctccttgagctggattttcttcttatcgatatccagatgcatctgctctttgacagcctctgcaatttccttgctggaaacagaaccgaatgttcttccaccttctccaactttcattgtaagtacaactttccctgcttttaactcttctgccagttttttggctgcatccagatgctcctgcgcaacttttgcctcattattcttctgaagtttgagatcattgagatttttcccattggcctctactccaagttttttcggcaaaataaaatttcttgcatatccatcattgacattcacaatttctcccttttttccaagagcttttacatcctgtaataaaattactttcattttaaatatctccttcttctatcatttgatcgatcgttgccttcaatgcagcgatcgcctcttctacattcgtatgttcaaactgcgcaccagcggcattgatgtgtccgcctccgcccagtttttctgcaatgatctgcacattcacctcatcaatggaacgcgcacttaaaaaaatccttccatcatatactgtcagcacaaaagaagctttgatcccattgatatctaaaagctcattggctgtctgagctgccagtactgtcggactcgaaatatcactcggacattgtgcaattgcatactgctctctgtatacttctgccatacgcattgcctctgctttggcacgataagactccatatcgtcacgaaacatctttctgacccgggtgatatctgccccacagcgtctcaggtatgcagctgcctcaaacgtacgcactccggtacgattcataaaattacgcgtatcgatcataattcctgcatacaaacagtctgcttcgatggatggaaccttgatatcatctacaatatactgtaatacttctgccaccatctcacaagtagaggaagaatatggctcaatataagacaatactgcgttgtcgatcacagtgctgctctgtctgtgatggtccaataccgcaatcgtcttcgacctctttagaagctccggacactctgtcatctgcggtttgttcgtatcgacaactacaaccatagtactgtctgaaacatgatccagcgcttctcctgatgtcagaaatatatcctttccatacacactgctctgtgcaatctcatcgtaaagcggcttgatcgaggtactgacatcattgatcacaatatgtgccttcttttccaaggcaactgctgcccggtagattcccatacatgccccaaatgaatctgggtctgagatcttatgtcccatgacaatcacttgatctttcgccacaataaactctctgagcgcctctgccttaactctggctttcactctcgtattcttcgctgtctgctccttctttccgccaaagtatgtgattcctctgcaatccttgatcaccgcctggtctccaccccttgcaagtgcaaggtcaatcgccatacgggcataattataactcagtgcatatgtcgctgtattaagccctagaccaatactcaaagtcgccgaacgggcatttcctatattgacctgctttacttcctctaacagggaaaacttatccgcttcaaatttgcggtaactttcctttttcacaacaaagaaatacttatcattttccagtttcttgacaatcccatccacatcattaatgtacttgttgatttttctgtcgatcaaagcaaccagaagagactggcgcacttcctcaacactttccattacttcatcgtagttgtcaatataaatcaggcctgcgatcagtctctgctcttcgttttcacggatataggaattcagctccgttacatcccgcatatagactgcaataaaatactctttttctttcggaatctggagcatgggttcactctcactgaagccttccaacgagatcctgcgcagttctacctgatagtcccgatctttgtatgtgatctccagctcgcttctggtatcatcatctttcggaaaagctcctttattcaattccggaatgatctttccgataaacttttcccttccatctacaatttccagaaaacggtcattcttccataagatatacccgtcttccaaaataatcgcatacggaaccgtcagttcttttaacagcgtattctgaattcccttgtactgcgtagaaaactgaatcaaatctgccagaataagagagcggttataaaaatacagaagtcctacgatcactgcataaatgatgataaacactgtcatcgtgaatccggctttgcggtctgtcatgtacatccagatattcatcgccaacagcaagactgtcatgatcagaggccactgcatatacatcttcagctgcccttttaaacgcatgtttttctttttcatgatttctaatcctctatccatactttcgtttgtacagcctccccatatgctgtaatttttacaaacttagtcttagtataccacttttttgtctccgtgtcagctttcatctgtatccgtctgatacacttcgccggattcccggtcaacggcgattttctttttctccaaatgttcatacacattacccctgagaagtgcatacaatacagaaacaatcggaataaaaatcaacattcccacgattcccatcaggcttgcaccgatactgacagctgccagcacccagatcgacggaagtcctaccgaacttcctaccactcttggatagatcagatttccctcaatctgctgaagtacaaggaacatgatcacaaagataatcgccttcatcggtgcaactgtcaaaatcaaaaatgctcctaccacacatccgataaacgctccaaaaatcggaatcaatgccgtaaatgcaatcagaactccgatcagaagcgcatacggcatttgcaggactgccatacagatcacaaacatcgttcccagtatcactgcctctaagcattggcctgtaagaaaatttgaaaatgtacggtagcttaacgaacatacattcagaatctttttcaccagttcttctttcatgtatgcatacatcactttccggatctgaatattcagtttttctttctgcagtaaaatgtagcatgcaaaaacaaatgcgatcataaatgttgtgatcccactggcaattcttcttgccactacaaaagtagatcccagaacactgctggctccacttgtaaaaaatttcacaacttcattaaaaatcttgtcccaatccaaagtcaggccttccagccactttccaatctcctggttgttatgaaaaatttcttctacccatccctgtgcccttgtcataaaatcctgaattccttttccaagagtcaagaaggtatcccccagctttggcaggactccgaacacgaccagtcctaccacgctgactgctatgaccagtgtgataatcagactgatcggacgcgccagtttttgtgctgcctttttatttttcatgacatgattcccaaaaaatttctcttcgaagaaactcatcggaacattgattccaaatgcaatcgctccaccgagcagaaatggaaacacaattcccaatccccagccgagcacttccagaatcagtgaataattccacaacgcaatcaaaagaatcactgtaaacacaatcagcccacgtatcttttttaaattttccttattcagatccatacttttcctgttctttctcccttctcctgcagcaatgcttttcatgcgcgcactccggacgcagtttttcacatacggtcacatctccaccgccaatcgtaatctgctttccattgaccagtgcatccgccaccttttttcgtgcttcattataaatccttgtaaccgttggtctggatacatccatctttaccgcacactgttcctgtgtcagctctgcataatctaaaagccggatcgcttcatattcatcatatgtcaaattgacatgtgctgttccataacatccctgaggcacaaatcctgttacttttggtttttcacaaatacatctgcatttttgtggtctcgccataccgctctcctcttttaccgccttgtcagccattttatttccagtatactctatttggaatagatatcaatctttttattttatttttattctttcaccattcctttcgaatagtttaatccgaaattcaattcataataatttcccatactgtctctgtatgcataagcctttccgttctcatccttcatttcatccggcatatacaaatctttgtcatatccaggtacatcgtttggactgatgcacactccttctgcgttcactgctaatacctcttctcccctcggcaatgtgacaggcagctttcctaccggcgcaaaccggccaaaaatgacatccagcgttgcagtcggatacgtatcaaaacctgctaacagcgcatctgactgtgtctccacatttttcaccagccatgcaagagtaaagttgatgttagaaatgacttttcctccatttttatggactgcatctgcaattctttctatcctgtcagcacctgccaaagtcgtctctttgtgtgttcctgcctctggtttcccgtctgcactcacattgcacacctctttttcctcacagatatccaattccagatatccctgtgttgcattaaaatactctccactggacggagaaatcatcaggattgcataatccgcttccttcggattttctgtcagcattacacctgagaacatttctttcaaagcctctgtagatttttttgactgttctgcatctttatggaatgcctcaacataaatgttctttcctttcagtttctcttctgtcaaaggcagaacatccttattcttcaaaagaactacactctgacggtgtgctttcgcagccgcatcccaatccatttgttctgccactgctttcacagcctctttgggatcccggtatggattttcgaacataccaagttcaaacatctcctgcagagtgcgagcaaccgcccgatccaatgcttcatccgtcaagatcagctgttctttttgaaaaccttccggaatcggatgtgtttcataatatgcatttttccctctcatataggcttccattcctgcttcattgtcatacagcccactgataagatccactcctgcatgattcactgcgaatccaatgcgctccggaatatccagcatctccactccccagctcatattatgcacaataccggtatcggaattgatatacccttcaaatcccatctgctctcgaagcatttcctgaataaacggacgattgtatgcgaatccaaacggctgaaattccagtttctccccattacaatccctctgcagtgcgctcttctctgctgccggctttgaataatacggcataatagatgacgtatgattcttcactgcagctttgaacgcggggatatgatacttctgtaaagacccctccgttgcatagacattccactgtcctgctgcataatgaggatcaaatccattctctcttgctccgcctcccggaaaatgcttcgtcgttactgcaacgccttgtgccgtcacaccttctgtgcttccctggattttaggaataatatgatccatgatctcatagatcagctccggatcctccccgaaagtaccgtaagtcctctgccatctgggatctgtcatcacatctgccatatacatataccccttgcgcagaccacaggcattccattctctgcggatacagtctgcgaactgatctgcaacttcaatcccggcgccctttactgctgccgcaatccccatcgtccccggccaggtggcaaaagtacccaccgcatcattcataccaaagaccatttcaccattttcattcctggaattcgaagctacgctgaccggaataaaatgctcacactcttctgccactgcgtggagctgattcatccagtctgccagatcttccggggtaggatttgcccgtaaaatcatatgacgagaaaaccattctttcagcaaagtcgtcgttcccggcagatgctgctcaccgaaaatagtctttccccgaaactctccctcatccaacaaaccactttcatctaacaccttctcacttggctcaaatgtcataggtccgcctgacggatactttcccattctccagtcagaaataaacagctgtgcgatcttttcccggaccgtcagctcttttacataagcttgcgcacgctcttttgccggaagtctccagtcatcatattccttccattctccgctgccatccaaatctttaaaatataatccgtctttcttgatcactttacggctgactgtcccaatggtcgggccatttggattctgatagtattgaaccttatctgatgcttttcctgccacaatgactcctcctttatatccatttttcgttttcccttattataacaaaaactgttttccaatatctactgaaaaataaataaaaaaagaaccaccacacgaaaatgtgtggtagtcctcctgatgtatttacgctctttggaattagtcctgtacgtatggcatcaaagcaatgtgtcttgctctcttgattgctactgtaagggctctctgatgttttgcacagtttcctgtaattcttctaggaagaatttttcctctttcagaaacgtactttttcagttttgctacatctttataatcgatttcgttattctcttttccacagaatacgcaaactttttttcttctgcgtgccgggcctctcttcttgaagccgccttctggtctgctacctttttcgtaagccatctccattacctcctgttttgataactctggcttttgaagttagttaaacggtaattcttcatcaattccatccggaatattcataaaaccgtcccctgcatcaatgcttggtgccgggccaggtgccggtgaagactggaatgaatttctgttggcttcgctctctgctctgctctcagcaaattcctgatcctctacaatcacttctgttgtgtaaactctcacaccgtctttgtttgtgtagcttcctgtctggattcttccggaaacggaaattctcataccctgacggaaatacttctctgcaaattcagcagaacgtccaaatacaacacatggaatgaaatccgcggtcggttctccgtctcttttgaatctgcggtctactgctactgtatatcttgcaactgcagttgcactgtcaccctgtgaatatctaacttccgggtctcttgttaagcgacccaccaaaaccactttattcatatatacctctcttctcttatgcttcctgtcttacgcataaatatctgagtacgttgtccatgatgcggatacgctgttcaacctcacctggaacactcgcgtcagactcgaagtgtacgaagtagtaaaatccttctttcattttctgaatttcgtaagcgaatcttctcttaccccattcatcaacgtctgttacgttaccaccgaaacgtgtgatcagttctttcactttctcaatcacagcagctctggcatcgtcttcgatttttgcgctgacaacaacagctaactcatacttgttcatgttctgcacctccttatggtctctggcccccggctcttccgggaacaaggaaaattgtgtctactgataattcagcagtacgtcacagtttcctattttaccataagattttatttgtttcaagcctttttcttaatttcttttgtattcttttccaccagtctgcgtgcaaccatgatttggtgtccgcacccctggcatttcaatcggaaatcagcccccacacgcagtatttcccattcatgactgccacatggatgaggctttttcatccggattacatctcccacatcaaatctgtctgccatcttttactcctctttgatcaaaactccctgcaaaagaaacctctcatcatcattcacattcgtacaagtggaaaggctgacgatctttgatgttctatccactcctggagaagtcacataattcgatgtactcctgcattctgccagatatgcttcgaattcttcatctgttgcaatttccagatcatacacctgcgctgtatccttcaccactctcgcagagaacacttcataagtccgtgtcttcccatccggtgtgtaaatgtaaaaatatggatgttctttgtaaaatgcctcgcttgcatattcattcagctgggagaacatctccccgccgactttcatattatgcccatagataaatgtatttcgatcactaaagtctgtctgattccgcatgtccataaaaattgttcccagcttattatcatttgctgtaaatgtcttcgtcaggtattccttattatctgcgctttttacaaccggataactgataacagacggctgatcaaatcgaatccatgctaccgtatctgcattttcctccatcaacttgtcaaaatccacctgaaattttggagcttcttccaccccttctccaattttatcactgacaatcgcaaggtttttgatcttgtcatattcttccccgcctgtataatacggtaccatcatcataatcagttgatatgcggaaaatacgaacacacagacagcaactaaaaggactgtaagtgataatggatcccatccctttttttgttttcttttcttttcttttttttctttcatttcaacctcttctgccaatttatttcgaagcagcctttaaaaccccagagactcgttcacaagaatcacctgaattcgctttggaatctgactgtatcttgtgatcaacatctgggaacaaatacatcccggctttctgcagtcaaaacatgttccatttgacacacatggtgtgtctttctgaaacctctgcgcattgatcggcgccgcttcgtttctcgccctgtgtatagcatcttcctgagtcttgaccaccttattcatccccacgatcaaaagaacatgcttcggtccatatgcataagccgctaccctgtttgccactccatcaatattgaccagaacgccgtcctcactcaaggcatttgtacttcccagaaagaaatccgcaaaaaatgctttgtgcatcattgcctcccgctcttccggcgttgcggtctgatctctgtcatacaagatataatctccactgcgaatcgcatccatcagcccgacttctgtgatactcatcgtcccgccccagctgatcgtgcttcccccgggcatcagttccaatgctttttttactgcctcttctttggtctctacgtaatatgcatccatatttctgctctttaatgcattcactacccgctcacccaaaacagcatttctcatacttctgacatccatttttattctcctttctgcgattgtgcaagcactccgtaaattgcatgtgcaactccaaattcttcattggactttgtaatatatttggaaaccgcttttacttccggcattgcattctccattgccactgttgcaccaaagtccatcgacaacatggaatagtcgttcagactgtctccgagaaccatcacttcatccatggcataccccagggattcaatatattgttttaaaaccggacccttttgtgcttccactgctgtaatctccaggttgctcggaaacgaagaagccactgccagccgcttattttcttccagcttttgactgatctttgcaagcatctccagatcattcgaatacaaaaacactttgtagaccgatacgttcgactctttcagttcctgaaattcggaaataattttcgtattttccacgattcttcgataaagtggggaagataaaatctccttctcgtccacatcctgccctgtatcctcatgaaacagctgaatctgctttaaaaaactttcttcaatttcttcttttgttccgattcgataatcatagcttccggaactgaaaataatagaaaccggaaattctttcaaatcttcatatatcgcttcacacaatttgatcgacagcggtgctgtactgatgatctgctgattttgatcacgtacctctgctccgcttccgaccacatagtcgcagacaatatctgtatcctttaattcttccatcgcacccctgaagttgcgcccggtggcaataataaagcggattcccgcatcacatgccgcatgaattgcctgcaatgtctgcggtgcaactttatgatcattgccaagaagcgttccatccatatcacttgcaatcacttttatcatgctgtcctcctatatttcttctttctgtcaatctcacatgtccataagatttagcataataactgacgaaaagaaagtcaacgattttcctttgatttccacaagaaatcaggattttaatccgacatttaacaatacttccacctcttccatctgacccaatatcttctgctgacgttcttcaaacagcaaacctttattatatcgataataggaatcggatccattttctctgataaaccatacactgtagtagtttgcattaagttccgtgataaatgccaccatttcctgactttctccaaatgcagcttccaggaaatcaaacacgtgctgcaggataccggcagcctcttctgtctgtgcctccagtttttctgtctctgcctcaaacaattctttcactgcttcataacgcgcttctcctgatgcagcatgctcttccacacgggttctggctgtttcaaaaaaggcttctgctttccgcagagtcttttcctgctcacgggtcagttgttctgcttttttccctgattcgagatcctgtgtaatctcccggatcacatgttcgatctcccattccttttgatgttcccgataggataacatgtattcataaatcttggtaacggctgcatccatctgatagcattctgaaaatatctgtccgacacggccgcttaaaagccctacaatactcagatgctcatccaaaggtgcgtttttcattttctggattacggacggactccatgttcctttcagcagatcttccactgcataatcctgtttgtacttataataaagtgccagatagtttgcgaaatcttttgcgatcagtttgtgctggatatactgatagaccacatctctgtccaccgtcttttccaacatctcatacacctggatcaactgcgataaatcttcccatccccgggccgtggcaaacactttgccatctaccgtattttcaatccgataaaaattctttctacggatttcaaggtaggaaatcacagccgggtggattccttgacgatatgcatactctttccatacctcaaaattctcttccacatcgatccgtttgatacgatccagcgtcaccacatcaaattcacgcacagatttattgtattccggcggatttcctgcagtcacgatcacccatccctccggtactttctgattgccaaaagtttttccctgcaaaaactgcagcatcgttggtgccagtgtctccgatacgcagttaatctcatccaaaaacagaattccttcccggattcccgttttttccatcttgtcatacacggatgcaatgatctcactcatcgtatattctgttacagaaacggtctttccatcatattctttttcctgaataaagggaagtcccactgcactctgtcttgtatgatgtgtgatcgtgtatgccaccagtccgatctgacattctttggcaatctgttccatgatctgtgtttttccaattcccggcggtcctataagaaaaatgggtctctgccggattgcaggaatccggtactctccaaattcatcttttgacaaatatgcctcaatggaatctttaatttcctgttttgctctctttatgtccatgtatctcctccaatttccgattcttctataataagtttcaatgcccacggcggaacgtccacatcctgatactcttcctgcataaatacaaatgctgtcttatatgccggcatttttcccggataaattccaaagccgtctgtaaaataaagtaatccttttaattcttcaaattcacggttttccagcatctgatctacatacgcaaaagccggacgaaaatcggtccctccttctccgtataattccagctgctccatatattccttcagttcttctgcacttgtgatcttccgatcggattgtaccctttcatcacactgcaaaatgtgtatattcgttttcttaaaaaaactgtctgcttcacacaaaattccatatgtttcttccagaaatttccgcaccagatctcctgaacacgacatggatgtatcgatcacaatgacaaactctgcaattttcttgacttcttttgtctcctgtggttcaatcaacggcatatttccgtacatctgaagcccataactgtaaaaagtatagtcaaacgtatctggatccactccgatctcctcccgaaaaactgcaaattttctcagaaaatctcgataatcctgatgctttcgattttcaatttttatctgatccagaaaatctccagtctgctcagaggcttctttggaaaatgtctccagatctgtttccatctcttcattgatctcctgccatttctgattcatctgtggatttggtttctgatcaggctgctggttctcccaatatttgtgatcatcctgataaaattctgcttccagcctgatcagctctttctcttctaattgccagtctgtcaagattcgataaattcgttctgcattcagaacttttccttctgcttccagtttccaatatgtttccctgcgaagcagacttttggaaaaccggacacttcgatgataaatcccatccatcatatgttctgcagcaatatcacagcttaaattccagtatcggtcatccattccctgtttgataaaatgacgaaaaatacaatgaaacaccatgtgcagatatccacggttgacaaggatccgattctgcctgtacagccctccaagctgctgcggatgaaaatataggactgctccatccgttccaaatggactgaccgaaggatccatctgatatgcgaaactactcagagctacatccagaaaccgcatccccaaatacagctcatctcttgccgcactcaaaatactgcttccgatctgctgaagcttttccgctgcttccctgctgttttcttcctccatacacatatatcccttctataaattcatatctgtttacagcacaaatcttttctgtttcaccggctgcatcaatcgtctctcattcatgagaatacttaaaatttctgtttttttcttattcgaagcacactcgatcgcccgatccaatccctctgatgtccataacttttcttcagagagtagtcgtattctccctatctgctcattttcgatcaaataatctacaatttctctcaaatgtgaccggatatattctttatactctgtttctgcttttttagcaagctccacaggaaacagaagtctcccaaaacagagatcgatcagcaccggcagtttttccattactgctgcaatagaaaacaaatcatcatattttctataatccagttctttggcaagaaaacactgtcggtaattatttccagatccatgatgctgtgtatataaaatccgggcaggtgtgttctctactgcttcctcataatgccctggaaatatcagctctgctttttcatttgccgattctttgctttcataaaggaaggttacatccattctctgccataactctcccaaaatttctttgacacagcttttatttcctgactgcagatgcacaaccagatgctccagactactgcacactgtaaatgcaccgcttccgatctgtgtcagattgtcagaaaactccagccttcttaactttctgcatccgtaaaaaatatatcgcccgatttcctgcatcgtagcggggagtatgacttcttctacgatttctcctgcaagcagcctctcatctgtctgcatcgctgtaatctggtccgtctgatatatttccacatcgatttcttctttgtctttccttgcggaaaatgcatagggcgctgcttttgttaccggctttcccgctattgattctggaatcaccacccgggagtcactccctacacagcgcacaatttcaatcccctcctctgattctctgtaatgtattttcatagatttgttactcctcctgcgaattgttcctgctaaaaatttagtgtaccatggattgtcaaatccaacaacctgagacaactttcttctatccggtatctgaccccaaatgaaaataaaaaaacaacggcaatcttaccatacacaaaaaattcggaaggagtccttccgaattttcttcatatagagcaagggtattgctcaatcatctaataagatgatcttgcaacacccttttcctggttgtatttaaatactacaatatttctattttgttgtaagatagaatgttacagcagttgtatctccatactgaagaactctgtatccagtctctccttctgccagtttatagttggatggcagatattttaccatggacaggtcgaatgtgaaatctcctgtctctgttcctgtatgcgtccactgtccggtacgaacccgatgatccacaaataccgtatagttcacggttgttgtacgttcctctacttccggtacctccggttcgaggactttcacatacacgtcaaagctgctgctgtttcctgctgcatcgtatgcatagaagcgtactttatactctcccggtgtcttcgatgtgaatggctgatatccatccagtccatgttccagaccccatttatctactttaaatgctgctgtgccggaattgtcttttacccactccggttttgtgaacatctctgtcagctgttcttctgtgtactcttctccctcattcaacgggatctctctcttatatccctttgctgcttcaatggctgcataatcaatcaccggtgcttctttgtcaatgtttgtaatgctaaatacatacgcatctcctgtcacacctgttgcacttgtcagggtaacgctgtattctccacttgccgtaaatacttttgtgaaggttctcttatcgactttcttccatccttccggtgttgcacagtctacagaggtcttgatcgtcacagttacatctttcttggtccagtctgtgatatcctgtgtcagttctaccactgccggttttgtattgtcgatgcgttttacttcgacaaactgcggttctgatacattgcctgcaaggtctgtcactgtaaatgctttgtctttccagtttgctgtaaatgtcttcacatagacataagttccgttttcctggcctttcagagaccatccttcacccggaagctggatctcttcgcttgtctcaagacgtacttctttggactgttccagtttactgttgtccacgatccactggaatgtcggagcaacggtatcatagtggaatgtcactgtcttttcatttcctgcctgatctacaacaactgctgtattttctccttcttttacaccgattttttcgatgtctgtcaggtatttgtacttgctgttgatctctgtaactgtatcattgaccttcagttctttgacaccttctgtatcgtgcactgcgattcctgtgatcttgcggaagcggtctccatttccttcgcctttgacgcttacattcggagcctgtttgtcaatgcctgctaccgtgtaggtcacttctttctgctgattgtcattggaaactaccgtaacactataggttccattctggctgtaagcttttgtcagcacggtatcggatacgcgagtccatccttcgatatcctgaacaggttcgtttgctgtcagagtcacggtcacatcctggtttgtcggagttacttctcccgcttcccctacgttagaataagatacatcaaccgtcatctcctgctgcagtgcatattcattactataataaattccatgggaatctattcttttcattcgtcctgatgtcatatgtaccgtgtacatacccggaccatgtttcatcggaacatctgcagtaaatccttcatcgcttacattttcaatataatcgttcagccagtcagatcctccctgctcttcttctgtcgggtaatatggcgtccaatccaacatgatatcagcgtcattaaaatcagaagatttccaaagataagaattatttgtgatcttctggcctgtaacaggattaattcctgtatttttaaattcaatatgaagcatcggagtcttggttccatcttcattgaccttcagataatcctggaatacaaattcaccagcttgagatacactgtgagagttaaaatccggattaattcctatatacataccacgcggattttccggttttaactgtaccttctcctttgcgctcaggaaatctgcataattcttcttcaattcttccgttgggcgattcggactataatttcctgctgccgcataggcagctctcagtggaatgacagactccgttgtatactgattgtaatcaaaatatttttgatttggtgaataataatacttcatttcttcgactacaaaagagtagtatcgattttccaactctgctgttgctttctcgatctcatcctgtgtcgttatcgctccatctgccaaaagtctttctgcttcagaaattgcttttttataattttcaataatctttggactgttcgtattgtattttgcttctaaccctttggtagcatcatacatctctttcagcttggttttgtccacctgaacattctgagtttccaagacctgaatctcatataatgagatcgtatcccaatcaggaaccggaggagtcagaggatctttattggaaatactgtcaatatgtagttttacatactgtcctcttaccggagccttaaatgtaataaagtcttgagtgctggaaggatgggactcatttctataggcagactcccatgttgttccatcacttgatacaagaatcgaatagctgttggcttttcctgattcccagaagagattcactccctctaacagatactctgctccaagatcaatctctatgttctgctctcccaatcctcttgcgcttgaccatctggagcttttatctccgcttccatctaccagtttatccgatcccaggtaatctgtttcctgtgaacttgactttgtctttttccccagtgccacattttttggattttccggaattgtaataccaccggcatccgccaggcgaatctcatctccaccttgcattctcatactttcttccgcctgaacaggcaccgaaagtcccgcaacggcactcgttgcccccagcatgatcgcacagctgactgctataacctgtttctttttcatacttcttctcctttatcctttctacctttgttttaaaataaaaaatgcacagattctctttctataagatcacccatgcatcctattttaatcataagcaggtctcaaaacggcagactttccccagctgtctctttatattgcagaaatatgtatacatagccgccgccccctttttcatcttcaacagttgtgtttattataaatgactcaaagaaactggtcaacacttttcctcaataatatccattcttttttacactccactgttcagaatacgaagcagcatatctccggttcctacattatatccacttgcagaatatactccctgcataccttctttgacaaccaggatcaatggcagtttatccggatctccatacattcttcgtgccagtacattgatattttccgttccctcatcatagtacaccgctgccccgggtaattctgtcttcgtctttgcaaacgtcggatctgactgatcctctttatttttcaagattaaattcactctgcttccaagagctgcaaattcctgacttctctcccggagttcatttaaaatatgttccgttggttcctttccaacctcattccagataaacaacgaggtcccctctttgattttttgacttcccaaaatttttcttccctgttcatcttctaccatgaactcttccaaagggatttcttccagcatatccttcaactctgcatttcgaagtaccagtttgatttgtttttcttcccctggcctcacatcaaattctgtatatgctgcaaactggttcccattcggaagtctattggttgtaatcacacgatacattcctgcctctacatccagatctgcttctccctgatatccttcccctaactgcagggtatcccagcaatatccgctttctgccctttttgcaatggtccagttctgcatataaacccatcttgtctcgtctcctgatttcaaatgaatctgtgcagttttttcacatggttccgcctctttctgaaagttatccacattgaaaaatgtgttttcctcataatactgcatttctccatccagcggattcagccttgccggaatccccaatgtacgacagatcgccacaaagagtactttttttgattcctgactggcacgctgataacgaaggactcctgccggcgttgtcagaagttcttcatattctgctgacggatcctcctgaatattcttgcaaatccaattccagatttcttgtggatttttccgaaagtctgctttctgttcttcgcagaaatattcctgaatctttttacggtatgcgctctgctgctcccgtgaaatcctcggatttaacacatattttgtaaaaatctccaaaggaagcgtatgtccccatgcacaggcctcctccagatgctccagaagttcttctgccttacaatctctgtaatctttcagactcaactgatccaacagcgcttttttccaaagagcatttggtgttttcgcatctaaaaatttctggatttccgcaaaatttcccttgctgttctccagagcatttcctgcttcttccccgaagaaactattcactttctccaatcgtttttccactgcttttcggaatttttctgtcccttcctttttctgctctgtggttggtcttttcgtgttcaccggagcatctgacggcgcgatcatgtcaaaggacttccattcttcttcagactttttttccgtaagcaccagggtctgcgaaacaacttctcgcgtatctaaaacagaagtcacatgccgcttgtccttccacacggaaacaaacaaacttcccttccctgtcttgagaatcacttttccatcggcatctgttttctttctggaaattgcaaccagctctgcataattcagaagttcaaaactgacctctgcatctgccacaggagttccatcttcttctgtcacaaagagttccagttctactgtttttgcatatctggacagctgattgaccccggatgtcacatctggatgctcaatcacatctccatctgctctctgagacccaaaaattctggaattgatcatcatggagcgagaagaagcattgacaaaccagcccagatccagtatttcctccggttcgcatgccccgagaaaatgccacgtaccttcacaccacacttccacccaggcatgattatcatcacaatgtgcccaacggtgcgcatatacctgccttgccggtattccgatgcttctcagtgcgttcactgtaaatacagattcttctccacaacgtccgattccattgcggtatactgcctcagcagaaatggtgcggtcgtccgttgcctgataggttgcctcttctgcacaccagtaatttgtctcaaggattgccgcttccatctgttttcctgtcacacgatcacgaagctgctcataaaacaatggtctgcaggaagtgattccctctgtattgacacgatgaaacacgacataatccaaaaaagtctcatccggaatccgggtttctcctttccaaatctgttcttttcttaactgcacgccatgtgctgcgaactcccgaaacatctcataggagtaatccgccacatcactaaatggcatattggcatataagtattgcagcagcaatgcgatttcttccggttctgctgcaatcttttcttccatttctttgcctgcattctgaaatcttttcacaaatcctgtaaactgttttcggatattttccttcgtttcctctaaaaacatgtctcttctcctcctgccaacagataatacaaactggatgttcccgcagcggttgctccctgcggctgtccctggtacagcgggttgtctgtccatgcagttcccgcaatgtccagatggatccatgggcgcccctgggcgaaggcctgaataaacaaaccggctgtaatcgttccacagtaatcccgccccatgtttttaatatctgcaatcttactttcaatcatctgtttttgctcttcaaaaatcgggagtctccaatagcgttcgccactgcgtcctgctgcttttaaaaacgtgtcgcagaacgcatcatcatccgacagcagtccggccgtagaaaatcccagcattccgactaccgctccggtcaatgtcgcaatatctattactctgtctgccttttcgtctttcaccatatatgccatagcatctgcaaggatcagacgtccttctgcatccgtattgcagatttcaattttctttcctccatatgacccgatcacatctcccggaaccagtgccgatggactgatccgattctcacacatagggatcacacctgttacattcgtcttgacctgattcacagccaatgcataaatcgccgctgccactgctgcaccgcctgccatatctcctttgattcccatcatagagcctgccggtttcaggcagtacccgcctgtatcacatgtcacgccttttccaaccaatcctgtaaccggtccctcttcattcccccgataacgcataaccagcatacacggtggattctcactgctctttcctacactggtgagagcttccatccccattgcatttaatttgctgtatacgatcagttcacattctactgacgtatctttcattcgttccatgatctctcttgcaaaatccatcggatgcagcagatttcccggtgcattcaccatatttcttgcccacacctgtgcttcagccagagaaatcccctgtttcaattctccttgcgctttggaatagagagtttcatctattcccgtcaatgtcacatccggaactttttttgcctgttcccccggcagacaaatctcatacgaacctgtgtagattccttcaatcacagcgctcgctgcacggattcctgctgcttccagaaatggacggatgtccatctcatactcctgaattcccattccttttaaggcactggctgcacctgccgacagctcctgaatggttcgaattgtaagcggttcctccccctgcccaatatatacggtcaagttctgaccctctccaccaactctggacacagcctggtaatcagctgacacataagtcagatcttctgcttctttctttccaataaacgccacccgcacgaatgcttttttctgttccgccaatacgatcatctttttcatcctcctatgtcaagtgtttaaatccttttcctgctactttttctgcttctgtaatgatcaccagggctttgtcatcgacctgatggactctttcctgtaaaagttcacactctttcttttctgacacgcacataaccacacgctgcacctcactggaatacccgccttctccttttaagactgtcactccaattttccgttccaaaaaaatctgacgtaccttgtctgtagactctgccaccacgatcatcaaatttttggcatctgcattctccagcatatgatccatgaacatcccggaaatatacacagtcacaaccgcatataataaactttcaatattacgatataccattgccgaagcaagtacaactgcaatatttagtccagaaatccatgctcccaccggaaactgtggattgcatttctgcatgatcagaccaagcagtgaaatacctcctgtattggactgtcccatgtgtaccaatgccagaccaattcccatcatagctccgcaaaacatagacgccagaagcgggtttcctttgtataccggaattctgacgatcaccagatctgtaacaacagacagcaatgccgtagatgccagcgttcgaaatacaaaagaaagcggaaagtatttctttactacaatgatcagaagcagcggaatattaaacacaaagacaaacagaccaatcggacatcccgtcaggtaattcaccaggatcgcaataccacttgcccctccgggcgcaattttatgaggcgctgcaaaactattaatccctattgcataaatcagcaccccggccaggtttaaaaggatgcaccggatcacggtctctttttctgtcttccattttttcacttccacttgaaacctcctgtagaaaagggatgtctgaaaacctgtatccctatacaaattttcagaacatccctttcttttaatattgaatacaaatcatctgatgtccatctactttttctgcccggaacttcacataggttccttcctgaacaaaggaaatcggcgtttcatccggaacacttcggacttctctgactgttttcccatctgtattgacctgtatttccagattgtacagcggaattttatcttctactgtataaatatcttcagatcttttttctgtaatataatgcagaatgtgcagcacatctcggtttttctccttctgtgcattgagctggatattcaatgtggacggtccttcgtatttcaccagcttttcttcaatgaaatattccagtgcatccttcaccatccatttgcaccatcttgcagcatttttacgatacagcgcaaagatcggatgggaaaaataaattgcattgccacagattgttgcttctggacttccaatttctccggaagatggagcatgctgatgagaacagaaggtttctccctgtcggtcaaagtatggtttgattttatccattagtacctttgcacgaactggttttacatcatatcctctcaaatacatcacaaattcttcttttggaagatcttttccgatcaccgtatttggcattacaaactctctgtaatattctgattctttttcaaacgccacaccataaatactatcgcttccgtcttttggaaggcaggaatcaaaggaaccgatcacatgaccgccctgtgccagatatgcctccatcttctgcttcaaatcttctgtataataaatgcagtccggaagaatcacaacctgatatgattccaatggcatctgactgtcaatgatatcaaactggtatcccagctcctgcaagatgcggaccgtcccgatcaaagacggggataacaccgagtcttttgcatcttccggataaaattcctccggtgtgatcactgcgatttctgtccgtgctttgacgtcgcggcaatatggctctttttcttccacgcttttgtatacttttccaatgaggtcataagctccttttgacagcacccctcttggatgaagctgatctccgatggagcatcctgctcctacagcaagcatatggaaacactcatattccaaagccgcctgatttttcagagaatggaaatctccccagtacgtatggaattttccagtcattccgatcatctcttttccaagattacgggcatacctgctggttgccgggaagtggtcatatccccagccgccgcttggaagagattccaactccagatgactgtattctttaaagctgttcttacttcttggtcctacatgtgatccattgtagaaaatcgttgcttccggcgccatactgtggataaattcgctgatctccgtcttaaattcatccagcatatgttctgcatatcgcatccgttctactttcgattcggtattcattccaagcgcctgcatcttcttgacacagtgttcgcatttacagtctacctggaacaaaatatccataaagattccgtccagattttccacaccgatcacttcgatcatatcctgaagctggtccttgaaaaactgtctgtatccgctgttcagacagattgtatgataaaaatgcggagccggaacaccctgtgtatcaataaactctccattttcatctactgcaagccactctggatgctcgcgcatgatccgtccatcccactgtgcagttgtataaaccggaactttgattccacgcttatgacacgcctcgatctgctccagcaaaaagtttttgttcttcagtcctggatgaatcagctccggaaatttttttgacggatagtacagccatccatggtgacatcttgcaaagcaggtgatcgaatccacatgcgcttcctctaatgtttttgcaaattcctctttgtcaaaatccgctgcaatctctggtatgtattcactggtatgaaagtccagatgtacctgtctatatctaatctcgctcattttattttcctcctcatgcctattctttcacagctcctgctgccagaccgccttctactttctcctggaataagagatagatcacaagcggaactgcaaccgtgatcacaatcgccgccatcaatggaccgtaatcacttccacgctctccattgaagttcagcaatcccagtgcgatcggctttaagttcttatcattgataaacaacaacgggaacagaatgttgttccatgcacccaggaagttgaaaatagaaattgtagagattgccggcactgtcatcggcaacataacatttctgtaaatctgaaaataacttgctccatcgatcaatgccgcttcttccagagaacgattgacacctttcataaaattagtaaccaccagaatgctaaacggcaagttaaaggctacatagatcataaccagtgctgcgatgttatttttcagattcaaagatccaataatataagaaaccggaacaagtacggtatgtaccggaaccatcattcccaacatgaagaacaataataagtatttattgcatttgaaatcaaatctggacaacacgtaggctgccattgtggaaacaattgcaagtacgatcacggtcgcccctgcctgaatcaaactgttcacaaaataacggctcatgttcgcgcttgtccacgcttccacatagttagaccattgtggaatctccggccaggaaaatggttttgcaaaaatttctacttttgttttaatggaagacaacagtgtaaacaacattggagtggcaaacataagtgcagtcaagatcagaaggatatacatgatcacactctgcagcgtaatcttcttacgggttttcattttctttttcatctgcgcttcctcctactctgctttctttctgcttgtaatcaaattgcttccaacggtacctgcgatacagattaccataatgataattccaatggcacttcccactccataatggttatacttaaaggcttcattgtacatcaatgttgtcggaaggtttgtcagaccgtttggtcctccacctgtcatagcaaataccagatcgaatactttcacggaaccgatgatatccatcaaaatacacatggaaagaatcggcttcagcattggaactgtgatcttgaaaaacttctgaatggatgtagctccatcgattgcagcagcctcatagacatcatccggtatagttgtcaaacctgccaggatgatgaccatataatatccaacacctgcccagacatttacaaatacaatggtattcattgcagttgccggatctaccagccacggcatcaccagatcactgagtccaatcacttccaacaaagaattaaaggatcctgtcggcatgaaaataaagtaccacatcagaccaaccgctgtcagtggaaaaactgtcggcacaaagaacaatgccttaaacaaacggtatcctttgcatttcgtattaatcgcaaccgccatcaggagtgcgatcggagtatggcaaatgacactgatgatgaccattcttgccatattctttaaggaaagaataaagtctgcattatgaaatgcatcgatataatttttcagtcctacaaatttcggcgcagatcccgcgattccattccaatcaaccaaagaaaaataaatggaaccgataatcggaataatctggaataccagatagattacaagcgctggaacaagaaacagcataattcccattcttgtctttttactttttaactttatcatccggaaacctcctgtctttaaaaaaatgccctgttcaaagcggacagggcattttgatacgtcctatgttatggatttctatttatcgatctcactctgtatctcttttgcaacatcttctggtttttcacctgtgaacatgcttgagatagagtttcttgttcgatcctgcatagaagccaatgggtcaaagtcaaatacatccactccgattccctctgatgttcctccaagctctacattctttgcaaacagtggggaaatcgcactttcatccagatcgatatctgttcttggaatcaggaatgctgcttcttctgcaaatctctttgcagcttctttgtctgtcagcattttcacaagttccagtgtcagctccagctcttttccttccagctttccactgatcatatatggagacaatgtctgcatgtcttcatttttgaattctggtttttcctcaaaatatgggaattttgcaacttcaatactctcgcataccggtgtctctgccgggtcttcaaatgttccgatattccatggacctgtgatcaccatcgcagcctctccctgctggaactgtgtcattgcaatgttgtctgtcataccggctgcatttttatcaaatgctcctgcatcgatcaggtcttttacgaactgaagcgtttctaccacttccggatccgtccacttcatatctctggaacctaattcttttgctgcatctgttcccagccatttgtagaagatctggtcatgaagatgtcctgccatataagttgtctgggttcccattgcgatcggaatcacaccactgtcttttaatttcttaatggcatccaggaattctgtccatgtttccgggaattcttttacccctgccttgtcaaataaatctttattgtaatacactccgatcagtccagattccattggaattgcatacgttccttcttttccaggaacctgataataagacagtgctccttctgtaaatccacctccccattccggatcttcgtccagatatggctgtacatccaggatcaatccattgtcaatatattctgacagatttgccacaccctgaatacggaaaatatttgccattgttccagatgcaatatctgtcgataaaatattgttgaatgcagattcatctccctgcgaatcgtctacgatcgtaacttctggatgtttctccttaaattcatccaggatgtcgttataaatgtctacctgaggtgttgttcctgccattcttgtaagaaggcggattgtgatcttatcacctgaatcctctttatttccgtcccctttgcttccgcatcctgccagaagtcctacgcacataactcctgccagaagcgctgctgtgattttttttaatttcattgcttcttcctccgttttcctttgaaacatttatgtgatgcacccagtatagaaaataagtggattttacacaatgttcattttctatattttttgttctttttcaatataggatttcatgtgaacttcttttgacattttttcttgcattctctataatgaccttaattctgttataccaaatatatcgcaaagaggtctcactatgaaaaagatcacacacgccaaaaattccatcagctttagttttttccgaagtatgtccatgacttccatcctgtttatgttcctgctctttctgggaatctctgttttatttctcaagcattcttttcagctggaaggaaaaaatgccttgcagcagctcagttatatctccgggcagtttcagtattacctggatgctacagaaaattactccaaaacaattttatcggatgataatgtacaggaatatatgaacgattatctttctgcaaagtattcctcccgggctactaccaatgtcaaacaacatatccgccagatcatacagtctacaccgtttatccactctgtcagcttatattccgacaagggacttcttctggtatccacagagcccaattccagtcagatgaatcttgtatcccctcctgactccccaatatggcgaacgggtacaaaaaaacatctgagtgaccgacacaaagaagtaaaagtcctttcctgcattcgtccattctatagtatcaattccggacaaatgctgggatacgtagagcttgctattccggaaacacagatttccgccatttatgcagaatatgatacctccaatgaattatttctgattgaccgggacggacgggtacaaagcagtcctgaccccactgaactggacagccggtatgaatacaccgactttattaaaaaaaatctggattcccaatacttttttgcaggaggaaatctgctgttttttacacattttccttctctggactggtatgttttaaatcaaatacccgtgatcacatttttgctgcctctgcttactattttttgtctttccctgttgattgcagctctggtcatggtactatgtgtatttgcttctcaccatattgcacaaaaaatcacctatcctttgagttatctgatctcccacatccagacagtcaaggaaggaaactgggttccgattcatgagattccgtgcaatgatgaggttgcctccctgttccgctctttcaacagtatgatctcgatccagactaaaatgaaagatgatctgattgaagcggaaaagctcaagcaacagctttctttaaacctccttcagcagcaggtgaatccacattttctgtacaatacactggataacatctgctcacttgcagaactggacgaaaaagataccctgatacaacttgtcatgaacctctcttctttttatcgttccagcttaagcagcggaaagatgcacatttccattggacaggagctggaaatttcaaaagcatatctggaaattctgcaaatccgctatttccataaatttgaattcatcatagactgtcctgaagaattaaaacgctgcagctgcatcaaactgctgctccagccaattctggaaaacagcatttaccatgggatcaaagggctggatcgatacggaatccttcgcattactgtagaagatatcaacgactgcatctgttttacaatttcagacaacggacgcggattttcagaagcagactatgaaaagatccaaaaagaagatgccggacacttcggcatacagagcatccaaaaacgaatcaaactctattatggagaacgctacggattgagcatccatagtcctgacagcggcggctgcatgaccaagattacaataccaaaacaggaggatttgccatgtcattaaaattactgattgcagatgacgaatacttcatccgtcaacgaattaaaaaaatcattccctgggaagcattagacctcacattcgccggagaggcagaaaatggacagcaggtcatcgaatacctggaaaaggaaccggttgatctgctgcttctggacatcaaaatgccacagatgaatggtatcgaaactgccaaatatatcaaggagcattttccctgcgtacacattctcattttatccggatataatgatttcgaatatgcacagactgcaatccggtatggagtaaaagagtatctgctaaaaccggttgcagctgaggaactggaacgggcactctccgagtgcattcaaactattcattctgagcagaagacccgccatacattgaaaaactatgaacactttcatttgtgcagcatgcttgccaatatccgggacggcattctttcctactccgatctttgtatgcaatatccggagttcgaaaatttcgcatacagcatctactgcagtgtgtatatctccgaccatactcacgatgctgtactgcagcttgtagatggcctccgaaaacagaattttctctgtgaatatatgcaggaaagcgaatacatttatatgcttcagatttttctttccgacaaagaacagctgcttcacattgggagctgctttacggattttattgcaggacaaaaagactatacattcttgtacattgaaaatattttccaggttaccacagactggaaaccatactatacccgatgtctgcatcttttaacagaacgctatttttctttggaatccaatctctgtatcagctattctcatccggaacgtcccggattttccgaagaacttttaaaaatgagaaaacattttatcactgccttgcatacccagaacgaatcggatctggtggaatacctggaaactctgttttcttccatcaaccataagaaaaacagcgagtatctctctcttgtggtccatgaaattttcgttgtataccacgtgtattttcatattccagaaaatctggcacaaccaatcacggaattcgcagcgtctgtattggatagcgaacattctctcgaaaatctgaaacaggaaatcctgttttacggacttcaatgtattcaaaaaatggataccattccatcggatcttgccctctgccgcaggatcatggattatatcggagaacactatacagatccttctctgtccgtttcacaggtggcatccaactttcagctgcatccttcctacctgggaagcgtgtttaaaaaagcacaacatacgtctgtactccagtacatttctgatctccggatcagtgccgctcagaaacttttaaaagaaagtaccatgaaaatttctgaaattgcagaggctgcaggatattccgatgtatattacttcagcaaaaaattcaaaaaatcctgcggatgttctccaaaggaatatgctgcaaaatacagataaaaacagggatgtcaactgacatccccgaattttccgtatatccatactattactcatccttttttcccgatcgctttctccacttcacacactctgtcagcagatactcaatctgtccattcatcgaacggaactcatcttctgcccactgtgcgatctcatcgtaaagctctttggaaagtctcagtggaacctgttttttcactttgcctttttctttcttttccttttccaaaatctgtcccaccttctaattatttttcacagatactccgcccgacgattctaatacaggcttccactgttcacgatcggctgtgcatctttatttccgcagagaacaaccagaagattgctcaccattgctgcctttcgttcttcatccaactctacaatatcattctcattcaatttgtcaagtgccatctctaccataccgactgcaccttccacgatcttctgtctcgcatcaataatcgctgctgcctgctgtctctgcagcatcgcagatgcaatctcaggtgcataggcaagatgcgtaatacgaacttccagaatctggattcccgcattctcaaccttctcctgcagctccctgcacataatctgtgcaatctcctgagagcttcctctcaaagacttctcatctccctgttcactggtgtcatacggatacatcctcgctgtatttcggatgatcgcatcacactggatagaaagatagttcttataattttccacattgatcacggcttttgttggattcataaccttccagatcaccactgctccgatttctaccggatttccaagctcatcattgaccttctgtttttcattattcaaggtcatcgtctttaaagacactttcttggcttttcccgacatagatgccggatttgcaattcctgtggaagtcacaaccggtccgcccggacgtacggatggattgatcgcttcacaaaacggatttacccagaaaaatcccgctgtcttaatcgttccataatattttccgaacaaggcgaatacataagcttcatttggattcagtactttcagtccgcaaaattcgatcatacatcctgccatcagcaaaacacctaccgtaatagaaaccgccagcagcgctgcattcgtctctcccgtctgaacaaatgtgatacttcctgcaacgatcactgcaactgcaagcagcattccgatcattccaaataaaagcatcacatatccactttttgctttcagcactttttcatcctgtactacacttttctctccatccatattcctgtcctcctcatatgaatttatttgatatcattttgatatcatcatagtagcaccgtccccttgatttgtcaatcagaaaagcgagagttgtctgttcacttctgcctgaaccacatccgggtcatatcccagcttgctcagtttctttcttcgctcttcgccatttccatatttaccaatgattacttcttttgcaatctcttccacacttttgaatggttgccctgtcacacctgctgtatacttgggtcttgcatagccgcggatctgaccccaacccaccggaatttgccttctcgccactgcctcattataatttccttccatcactgtgatcatttgtcctgaaacagactccacgtatccaatgtgatcggaatacccgtcatttggctgtacctggcaatcccagttatacaaaatgatatctccgggcagtggcacgatagttccatcttcgatccagattcccttttctttaaagatttcgatatgattttcacatccgcattctgttccgatcaagtccacatatcccgcctggatcgctgctgcagaaactgcggtatcacaccactcatcggtatactgcacagcatatccccttgccagcggcaagtgggaattatacagatcaataatctgtcggaacttcccgtttgcttcactgtagccaatccacgaacgcatcacgttcaatacatcctgagcgcttcttcccgatgcattttcatcatacttcattaactgatactgctcaatcagttccatatttttctgcacatagacggaactggtcgcatacccatctgcccaaatggtttccagatatcgtccgggttctgtgattcccttcagattttgataacgtggaagctgaagcagttcaaaatatcctttcaccccctcttccatattgtcaaatacccggaaataatcggaaatcaccatcgccgttccggcctcatattcctcccaggttgccagattgacagactttccctgccattttgttccacatttcaatccaaaataattgtgatagtctttcgccagcctggattctccccagccggactccaaaattgcctgtgcaatgatcggactgcatactttgatttcatatgcagccgcatatttctttacatatcctgcgattttctgaataaattcctctttcttcatcgctctcccctgctttctgtatatttctctgcttttccatttaaaatatcaattgcctgtctgagtacttctggaatgggcatccccatcaatcccgcgttttccagaatagacaatgcttcatttgcgataaacgcaatgcacacggcatccctcagataatttgtccccatcaaaaggtccagacggactgcgatcaaaacaaacaacagtgtcattccttttcggcacagccctttccagcccgcacgactctccagtctgccattttctgacttcggacttttcttaaaaatcaccggcagaagaattccgcctgtgatccagtcgattcccataaaaagaaccaatgtctgcagtgcgatatcccatccgccaaataaaagggcaactgcactcccaaacattccaaacaagctcgtcaccatttgcttcatatccttcaccaccttcaattaaaaaagcagaatagacggcattcttttcaaagaatgttctactctgccactcatttttcttttccttttttcattcgatcctcactcaaggatgctctcttgtttctgcataatcgtctaacacatatctcgcatactttgttgcctgacgctccatcccgatcggggttaattccaatgcgttgcccgtattttctttttattttttatgtaggcaacaactctgaggggaaagaaatattcttttctcaaaaataccgcaaactctttacatgcccttcgtacctccggatctatcccgctgtcaaaccgaagtctaaaccccgtccgatgaccttcttccataaaatcaatgttttgttcccagttttctatcgtccaaatgggatccataatgtttatcccctttcatcataaactgctttcatactatgatattgcttcttttctttttgcactccacataatctgtcaataaaaaataaacctatttttatggcaaagtatattacaaatgcaaagactataagcactgtttctttaaaggcctctttttttaatcatgcacactaaaataattaagaatagaatcaagaacattacctgctttaataccacataacgatatgtatttgtgaatttcatatattttctccttacagccattcagatattttcccttttatcgtatcgataaaaggcacttacttgcttacccttatactctatctctgttgcattttgttcttcaaacatccacttaaatggtttcataaatccccctcttgccgatatacatcggaagtggcagtttcctctgtatatcgacagtttcttactgttttactctttattttatctcttgtatttttacaataatttctgtttcctcttcataataaacccgataccgctttcctttctctatctgttcttcacatagtttcttccgggctggtccccatatctccaactgtctcttatctccttccgctcccataaaagtatatcctcgatgccaggattcccaggcttttccttcatagatacaaatattctcattctgaattgcccgtgtatcttgtataactgtgtacaggcaagcaatcacaaccgctattcctaatagcatatcacctatgtttctcttatttttattccagaatttactttgtactatcatggtaattcccacaactccaaacactccaaagtatatcatttcctgatagattcctataaaatcatacatggatcttctcctattctatccccatcatttcttttcttccggtttctcatcaaatgcaattctttcaataattctggaacgtctgaaatagtaaaatgtcacgattttttggtcagcaaattttgccagttctttccctgaggccacaatttgaaatttcattgctttggcatttcgtattggcttcaaaataattttcccatacacccagttacattcactatatttggtaacatctctagttgtttcttcacgccataatcctatttttttcatttctcgtatacgcatcctatctttttctggtcctgtatacaaatcgattataaatagtacaacttttattcctttccagcctccccacataagccccaacgatgagattcctatatctaacatagcctccgtatgcttctccgctatatacaaaatagataatccaaaagacatatcccatatcgaccaccatatcactgcgatacacgtcactaaatttaacaaaactgcaaaccaatatggatttttattcttcatattttctcattcccctgtatgttcaactttttacaacatcttcaccggttcatacaccatgctccgattcataccatacctttcgcaatactggtaaaattcttgtgaaacaatattgaaagaagatgtatgataccctcttttttgctctgtcaacacatcccctgttttatagacatgtgtttgatctttcaaataatttttgtccagcaccaacttctgtaccggatttggaattcttatcattgcttttccacatttgggacaagatatgatcggcttgtttgcaattgcttccatcggcaatgtttccgcaaaatataactgatataaatcttttatctgcccttgggaagcatatttcttaactggccagaactccaaacctttccaaacacttcctaaaacccttctggtcttgtccgaacaaaacaaaaggtcatctgctgcattcggcccactgaaaaattgtcttgttccccaccttacaggcttcgtaacggataaatatccaatctgctcctcatgtcggtattccatttctttctgaaatggtcttttataaccgcaggagcgttgaaatgcatactcatcatattcccactgcactttcacgcttttgttccgaacaaacaaccattgcgcctcttcaatttctccttgggaatattcacaggttgtaatcgaatccagtcttgaaacaaatggaaactgttgcttaaatttttcatacactttctgatcttcatacaactcaaatagatactccttatcacttacttgaacagatgtccctagtacttcaaaagaatcttctgtttgataagggatttcatatcgattcagaaatctcaataaaccaaacttatttttttaacaataataatgcttaatcctcatattgcaccttttcgatttcaagatcaaaaatcaaatcgtcaaagtcatcatcccaatcaatatcgttgcagtaaaaccgaaacttatcctcacctaattcttctttgatcatggcgcagccacccataaaacaatctatccttcctacatcagttttggaatacccattgctaatgccaatatctccttcttccaaaatgatttctagttcaaattctttcggagcccaggtttcttcaaaaataatctgtggaaatctccttctttcctttttcaaacgttttccattccagaatatcttccctttaaatccatccaaatgtaaaataattgactgttcatgttgcgaattagtacttacaaaagtaaattttaatcgatacttcccctttttatcgtatcgataaaatgaacttacttgcttacccttatactctatctctgttgcattttgttcttcaaacatccacttaaatggtttcataaaaatttcccttcgtatatcaaattaaatctaatatcgccgctatccatgtcatatctttttcgcatattttttctttttgtaaaatatgtttcacaatccatctgctatatgtgggaaaatagcgattcattcgataccacatcggacattgtggaagcttaaacagaaccagattattctcctggattgcatttttctttccaacaatcttgcatatagcatggaacactgaatccggcattccttcttttctaacacaattcatataaaatacacctaccattttattcttccaatgattcctgtagtttcctatatgatttgcaattcgcgcgtcctctatcgtattccatccattataaatacctgacatcaaaaatcttcgatgatttccgccgtaacagtgcacaaacgcagaatttaccctatattttctgttttcaaacaccatcaaaattttttcaaattctttcaatgacaactctgtttttaataaatctcttctaacatttacttcagctattaaataatcactatgaaatgtataatcaagttcaatcgaaaaataaggaaatatatccttatttttcatatggcattcaaattctatcattggcgaagaatctgtttcttcgccataatacaacataggaatttgtaaatttataaattttgttctccccttttttccattacggaagctttttccaatttgcttataatcataatctggatgcaataatgaatatcctaatttttcataagtacatcctaaaatggaagaaatctcatctgcaatttccagcatttcacgcccaatgatttctgatggatagcttccgatatagattttcatcgtataataaaaatgattcatcacagattttttatcccccctcttgccgatatacatcggaagtggcagtttcctctgtatatcgacagtttcttactgttttactctttattgactttcatcaaacacaatcttctcagattaacgcaacatatattccgatggtaactcgaacttatatccccatccataatattcatccactgttcttggcaaatctttattttttaaattataatgcttccggttcctttcacaatacacatatggaatcttcatacaaggagtcagatctccatccaacacattcatagaaaacagaaacgtctgtatctgcggcatttgattcaaaaaactcaaacttggaatttcatttcttccagtcaactctaaatgtctcagatttaccagtttttccaataccgaaaaatcttttaccttcggacatccactgatacaaagcgcctcaacagattctgctatatgttctagcgccgaaatatcttccaacctttttaaatcttccagttgaacccattttaagttaggggctgtttctatatgatctaaatttcgaagttttgaatcatatatcataagatacttcattttttccgagcaaaaatattcccttaagtcttctttattacaatcaaatatcttaagtagttctaaatccttcactttttgaaatcctgttccacttctgaaatcacttaatgatatcctaatttgtttgatatgtttcattttcgtgaagtccacaaaaaatttattaactcgtggagcacctgctaaactttctgctccacaatccacagcttctaaattttccatctcatacaagggagaaaagtcaaactctttctcaacgcacaggggaacatttacagatgctgcctttattcccggacattcttttaaaaattcaatactttccgtaaaaacatccactctctccacattattttcattgataaattttacatgttcttctatggttcgttctgtacggcgtttgggtcgttcctcttgtgtattggaaattctcatagcagtgttccctttataatcactgaacacaaatccgtctattttgatcgttccatcaaaatttttaaaatacaaatcattcctttgctcttctgtaagttcaaatgccttcatgtagtttctccttagttcaagacggcagaacagccctactaatattctgttccatcctgccgcctcgtcaaatcatttcactcatccacttttgttctacagcaccttttcgatttcaagatcaaaaatcaaatcgtcaaagtcatcatcccaatcaatatcgttgcagtaaaaccgaaacttatcctcacctaattcttctttgatcatggcgcagccttctacgaaacaagtgatcatatctgatttaggtcttaaacacccgttactaattgcaatatctccttcttccaaaatgatttctagttcaaattctttcggagcccaggtttcttcaaaaataatctgtggaaatctccttctttcctttttcaaacgttttccattccagaatattttccccttaaatccatccaaatgtaaaataattgactgttcatgttgcgaattagtacttacaaaagtaaattttagtcgatacttcccctttttatcgtatcgataaaatgaacttacttgcttacccttatactctatctctgttgcattttgttcttcaaacatccatttaaatggtttcataaatccccctcttgccgatatacatcggaagtggcagtttcctctgtatatcgacagtttcttactgttttactctttattgactttcatcaaacacaatcttctcagattaacgcaacatatattccgatggtaactcgaacttatatccccatccataatattcatccactgttcttggcaagtccttattttttaaattataatgcttccggttcctttcacaatacacatatggaatcttcatacaaggagtcagatctccatccaacacattcatagaaaacagaaacgtctgtatctgcggcatttgattcaaaaaactcaaactcggaatttcatttcttccagtcaactctaaatgtctcaaatttaccagtttttccaatacagaaaaatctttcaccttcgggcatccactgatacaaagcgcctcaacagattctgctatatgttctagtgccgaaatatcttccaacctttttaattcttccagttgaacccattttaagtttggggctgtttctatatggtctaaatttcgaagccttgaataaaatatcataagatacttcattttttctgagcaaaaatattcccttaagtcttctttatcgcaatcagatatcctaagtaattctaaatccttcactttttgaaacccggttcctcttctgaaattacttaatgatatcctaatttgtttgatatgtttcattttcgtgaagtccacaaaaaatttattaactcgtggagcacctgctaaactttctgctccacaatccacagcttctaaattttccatctcatacaatggagaaaagtcaaactctttctcaacgcacaggggaacatttacagatgctgcctttattcccggacattcttttaaaaattcaatactttccgtaaaaacatctactctctccacattattttcattgataaattttacatgttcttctatagttcgttccgtacggcgtttgggtcgttcctcttgtgtattggaaattctcatagcagtgttccctttataatcactgaacacaaatccgtctattttgatcgttccatcaaaatttttaaaatacaaatcattcctttgctcttctgtaagttcaaatgccttcatgtaactgctccttcttgaatattatcacgccttcatttttccgtcccatatcttatccccattcgggtatactttatcggacgaagtccacctgccgtaggcatgcattgcgggatgcccgaatggggatgctttaaaattcaatagctcttacaccttacttaatatttgagatattgaaactttttatgaaactgattccttcctggactccaaattttgttttttaatgtatgctgtgcatctttaaactttccatttggggacttttcaatccttcgacattgcatcaaatattcatcgataaaagcctcattttgggacggagctgacttccataatattgatttcactgttcctttatgtcctttggctgattgaatcgctctgtcaaagccaccttttccaacataacttagtccatccgtataaaaaatttcatatgagccaaatccttttctaatttcctttggtaaactcattgctttcgctgacttaatgatgtcatccccttcttcagctactttctgaattttcgtaatagcctttgtagcttctccaattccagtaacgaatggaaccaaatcaactgcatcgcctactaaaccagcccatgccaatacatctgatggattagctgcaacctccacgatacttgctcccaaagtaactacatcaagtgctgtctcccaaaaatcccctcctgtatctttacgtatcacattattattgtcacaatatacatacaggttcttatctgttaatttggtaggcacttttcctataaggcttacatcatccgcattgacaaatctccccgtctccggatcgtaataccgactattcagatagtacattcccagttcttcgtcatagtagtatcccttgaaacggaatggatttcttctgcccagtccattcgaactgtaatccgtcagattcagcagttttccccaggaattatactcatattttacaagttccgttccgtggctgtcaagaattcccagaatatccccaaaaagatttttgcggtagaaatacatctcattctgatacttcatggcgaacacattgcccttgtcatcatagaagaaatcgatcctgctgccgtcactggacgtctgcatcaaaatggccgaaccatccagatagaagtctgtcgtaactccattgaccgtctttcggattctctttccactgtcattgtacctacagtacatatccagtccagcgcctgtgatgtgcttcagctgatgtcctttttcccattccatctgcattccccgatactggatcggatttcccatcacatcatagatcatctcctgtccattataaaaacgaagctgatctctccaaccgttggtctgataagtaaacgtatctattttccataacgttcccgtgatgatcgaactgtccgtataatcatattctttccggctgaccatatttccacccacatcataggtgtaacagattgtcttattctgcttctgattgtcttctcgtaccagctgattcagtgcatcatagtagtagcggatttttctttcgctgccatcggcgcttcgctccaccatggtttccacatttccgcaggcgtcataggtgtaggattctgcacgggttccttcccggacagatgcaaccaaatttgtggtcactcctgcctctttgcctgagacgtatgtatactcctgagtcgatgtattcgtatcagagaagtgattgtgagtacggatcacacgtccaagggcatcatattcataggcaatcttctgggcgccgttgatcttgattccatatccaagtcctggtttctgctgtttctctacatccccgtaaaggaattccacctcatgtccaactcgatctttctgatacgtatatcctttgacacgatttttctcatcatacactttgcgaagtttcattccgtcagaacggtctgttcctaccattcttccgatcaggtcatactggtatgtgctggtcactccactgcaaagatctttgtgccttgcaatttttccacagctgtcatacgtattttcaaacagtttttcttctctgccgtctgcggtgatcagatactgtgccgcaagctgttcttccggattgtattcatttcgaacggcttcccctgtcgcataggtaatcctgtccgcaagaccgttccggcttcgaagcgtggtgcgctccagttctcttcctccaaccgacacggattccagatttccaaacggatcatacgcataatcatacgtaaatccattgtgaccgatggatgtcactttttcgttttcataggtgtaagaaactttcacttcttttccatccaccattctcgcaacttctgtcatcttatccgtgttggcatcgtatgcataggaagtggcatttccttttgcatctgtcagcttcgtcagaagacggttcttgtcatcatattcataatgcacggtatttcccctggaatctgtgatcgtcttcggctgcttataatccgatgtatatgtcatggacgattccatgcgttcgctgcactcttccaggatccaccatttgtttacctgactgttggactgatgggctgtaaaaataatgtctgctccttttgcatacgaatagtccatcacatccagagacagatttccatctttacagatgatcgcatatccatttcccggtgacacctcttcgaatcggaacagctgatttgcagctcccggcatagccgtctctaaagaaagaatagaaaagcctctgtcgttggttcctgattttgccaacacttttcccggtgcgtgaaccggctctaactgataatacatgccgtcatatggcagcaaacgatactgctggttcatcccgccattgtagttgaactgcactgcctgtgttcccactgcggtcgaagcattcttcacatcaatatactgtcccgaatgacgtacccggatatgataaatccctcctgatcttggagctgctgagacagttccttcatctgccggttcaaaataccagtcctgatgttcgtttccttcttttcgtgtataactctgcaccggctgtccgcttgtcgtactctttggtccgtttgtcagagctttcttatctttggttgccttattcgtaatctggaaacttccatctacatttggatacagtttccatttctgggcatccgtattgttgtttccataaatctggatcttttctccttctgcatccgattttccattcagatccagacgatatcccggactacagagcggctcaaactgcaaatatccatcctttccatcgatcagcttccatttctgcgcggcaaatccaaagaacgtgcacaactgtaccacagttccgtttgccgtctcactatttctgacatccagataatttccggaaattttttcccggatataatacactctgcccggtatgactgctccgagatattttccgccatctgctgtcatctggatcggctgtcctttgtcattgtatgtaaatcgataacggactccttcagaattggcagcctgagtcagatgatttttcgtatcgtatcgatattcaaaccctgttccgtcaatacttccaagcttcgtcagacttccttttttgtcgtatgaaaaactctctttttccgctgcactcactgcatggatcagattcccgtcatcatcatactggtaactctccccgtcatctctgacaagctgcacacctttgaataagacctgattcacctgattgtgatacatcagatacacatggatcgccttgtatgttttcttcgccccttcattttgatcgtctgtactgaaggtgttgctgacaaactgccatcctttgatatttggattacactggaaatgatgccatttcacagaatcatccgtataaatcaccgctgcggataaagaaaaatgtttctctggaattccaaagcccttgacccagcagctcaggttaaaaatgtctccttcttctccggtaatattaatcccctgcatcaaatggagattttgttccatctgtccgtttaataccgcacatctgcctttatctgcagtcatcacacttttgaccccggatgccgccggatggaattcccattgattcggcgcttcattcgtacaccgttcaaatcccggattgtcgatcagattcagttcgtttgccacatttcctgcctccagctggacaccgcttaccaaaagggttcctcttgctcttgtcatccccacaaacacggaaatggtttcttctgccggaagctggaatgtgagaaccagtctctcccatccgtcatctacatttttatctgtcacataatcaatgcagcgttctcccatgattctggtccggtctgcccggatcacggatacagccgctccctgtccctgatcttccgggctcagagattctgtttttacataagcagacaacgtatatgttccagctgacagatgcacatcctgacagattccttcttctgatgttagttctgtttttgtcagcttcgcactttttgtgcccacatatccgtctgcatgtgtaatcgttccccgttttccatctgacatacgtaaggtataccatcctccatctccatgggatggatcaaatgtcggatttttcagcaagccatacacggtcttctggacagaaccgtctttgctcagcttatggttcttcataccggatgtatagtaagaataattgttcgcaaatccatctgaatccaacacatctgtcggacgtcccatattgtcaaaatgccacgttgttttcttattgtcccccggacgctccatctgtccgtctaagcccggctcttcaaaaatggtagtgtttccattttcataggaaatcttcagttcctgacccggtgcatttttctgtcccgtttcggatactttgctgacacggggcactcggaaatcattggtgtactcataattcacacgatagccatccggattggtcacgccggtcagtttatgagaagaatcataagtaaactgtgtcacggttccatcgggataggtaatggaagtcagatttccctgcgtatcatatccatatcggatctgacggccttttgtatcctgaatggctgtcagtctggactttcctgcatcggtggagtagataagatccaaaaagccgcctgccgcatcggtaatatgctccagtgtatttcccgcagaattcggcccatactgatgtttcacggaatttccgtccagatcttcaatgaatcgtaaaaatccgtcctggccgaatacatacttcatcttgtcttttgtctccatcgtgcggtaacggtcatgttcagaacttgatgtcactgtgatggtcagtcccagtccatcctcatctttcagcttatctccgtcttttgtatctttgtagaaataatgttttgttccatcttcatcgatatacacatatggataatctttgattccgctttctttcaattcctgctgactgctgagtctccatccgtatcccatacgggaagaggtatctgcttcactggaattgtatacgtgacggatttctgttgtcatcggaccgccctccgttgccacatccagatgactccagacaacatttcccgtaaagtcattggtgtaaccggctccggaacgacctgctgactgttcatgatagctctgataatcttccagaccattcacatttctgtaataaaagacaccgcttgggaactggtcggaagaaatactcggagaatccgatgcgtaaaatctcgcatatgcacggtttgccagattttcatctgcttcgtactgagatttcaccatgattccataatttttcccggtattataccactgtcgtacaagccttgtcacatcaaatcctaccggagtgatcatcacagtattgccatttacaacctgtttcacttttttatagtccagcactgttccatcgatggccggctgatttccccagcggacactttgctcatcccagctgtttttcacctcatatgcaagaagcggcagttctggattgctgtaggacgaatattcaaactgccagatatacatggtcgctccgtaaatgatcgatccctttccgatatccggaagatcccggaatcggagcaatgctctcatttttcccagttcatcacttcgtccgatcacaaaggaaccataagcatgtacctgtcccggatcctgaggtgtatttcctccggtaaaaatataagtatcctcgatatttccttttgtcttgctggtctctgtcatgggatcgatcacgatcggatatacacggttcgtgtccagcatccactccaaatccggtacaatcgcaatcttgctgctttccatcccttcttctacctggaattccacctgaaaagattctgctccggcagcgtcatacaaatatggctttcggaatcggaaaatccgttccgcttttgaactgctcgcatcatacagaccgattcctccatcttcttcctttcttagttccagacccggatgcttcagagaaaacaccagattctgttttgcagcttcttttgtatgaaaacgaatattttctttgatctgctcactctggatcgcataatgcagatcgattcccggaaaaatttcttcataaattccctctccggtcagatttttcacacacatagttttacaaatttcatccgattcagaggattctgctttcaaaagagcaggctgcaaattctgtaatttggaaggattccaaaactcttctttttcaagtactcggaatgtggttttcttttctttatcaaacacgtttcgtgtactttctttgcataaaaaaggggtaaatccccatgaaatcatttttcctgccttctcaattgtgacaagatcctgcgcatctgcttcttttgcaaaacttaccttcacggccgatgcaagattctgatacacttctcttccattcttctgtacagcttccagacggttgtcaatctctctccactgtccttcttcttcgtaatgaaccggaaccggatatacggctgctgccattcccttctgcgtcatctgaaaatgcttgacacaacgttctctcttttctgatacttctcgtaaaattttatctctcatttttccctcctgccgaactcttcttgtttcggtctttcttttttacacgtattgtgcacgtttcgtgtacctgtataatacacgttttgtgcttctttgtcaagcacattttgtggattttttgtttacttttttccacggattgtgtataatcatattgtattcataagaagttttgatttttataaaaacttctcagtgcagcaaaaagctgcttagaaaggacgtgtatcttaatggctgtatttgccagtatactcaaaacactgcgaacagataagcacttatcccagcaggagcttgccactcgccttggcatctcaaaaagtgcagtcagtatgtatgaacaaggacggcgtgaacctgattttgacattctgaataaaattgcagatatcttccaggtcgatgcagactatcttctcggacgtagttcactctctcacgaacccgaacctgtcacgattgccgcacaccttgatacctctgaccttacgcaggctgaattggatgatgttgaaaaatacattcaatttatccgttcaaaaagaaaacaataaaggagcattcagaaacggctatgctgaacaaatatgaagaactgttagaagaggctgccgcccagaacatatcagtagatgagaactttccttttcatggaaacttaaagggattgtatgtagatcaaaatatcgctctctcggaccagttggagacctctgcagaaaaagcctgtattctggcagaagaacttggtcatcactacacttctgtcggaaatattctggatctttctgatgtttccaacgcaaagcaggaacgccaggcacgaatgtggacctacgaacggctgatcggtctgcgtggtttgatcgatgcctatcagcacggatgccgggaatatcacgaaactgctgaatttctggatgtaacagaagagcagcttcgcgatgccattgccgattatcgctcaaaatatggagtctgtaccaagtatcaggattactatattatgtttgaaccctatctgatgataggaaagaaaaaatgaggacaacgccatcgtcgtcctcatttttctattctttccacaaaaaattccatagacattaccatctatggaacttaacaactccccgagttgggttcgaaccaacgacccttcggttaacagccgaatgctctgccgctgagctatcgaggaatactataaaattgtctcagcttcttttcactgagtaatggagaatacgagattcgaactcgtgacctcctgcttgcaaggcaggcgctctcccaactgagctaatcccccgttcaagctgttcagttatcaccgacagctattaaaatataccatatcgtacagaacctgtcaatagattttttgaattttttctaaaatatatattttttcttcaaaaccaactttttaaaactaaaaattcccttttaaaatgacaacagtcgtgtaatcagtatattattctcatacaaaaatgtcaaaatactacttttctcaatcatctcaaagcaggcctgccctgctgtgttactatacagcagtgtcacgactaaaaataaaagccagacgatcacaagcgctgccgctgcaccggctattgctcctccaacatggttgatgagccccaaaaccggaagttcccctaacagatcaactgctgccatcagtgccctcaccaaaatccacaccagaataaacgtgataagaaatgccaccactttcaggatcatccttgcaatataggacgccacatactccggaaacgtctgaatacctagttcctgatagattgtactgttattattctcaagaagcctgctttttaaaaactctggaagcgccgctttttcaatttcctgaatctgcacttcttttggaatctcaccgataacattcaggatatcctgcatactgattcccaaacgctcccagtccagattgttgatatttgccagttgatccgcatccaatgttcccagtgtcgtattgctcaaatccgcgttcttcagtgcatctgctgaaatctgaggcataaatatttccatacatttttcttcaatcatctcatctgcaggtgtccagcgaatcaatgcatcactgacatacggcgtcagaaacataactaacacaatcgtcagaatcgtagccagcagagaaatgccaattttgagcaatcctctcacatatccgaccacaatgctgatcaaaaatatcactcctacaataatcaataaccaattatccatattttctcctaatttgtcaggtaaacaacccgcaattcatcggctcctgccagaagatatctgtggatcccttctgttggcaccacatcctgcacatccattccccagtcccccttaaatctctggattccggtatcactgatcacacagccttttgtcccatcaaataatatcatttcatctcctgccagttttgcgtgactatattctcctgttatttccctgtttatcatctgttttcctgttttatcataaagctgtacttcatatccggatttgtcctgatttgtcagtacaaatcctatgtatttgtccgaatgaaattcacttcgtatctcctgattcagatttacttcttttttctttttcacagactgtgtaccttcatagattacaaaggatttatcacctactgcaacggatgtggacgcgtccatataaaacacatctgcaacaactgtctgttcaaattcctctgtataaatcagattatcggttttctgctgccctgcctgtccaaagttataacttgcaaatacagactttaaagtcccgttttttgtagacagataggataccaggagattttttccgtctgccgacatatccagcgagatgggatagccgatactgttcagattcacctggtgctctaccaaaatatttcccactgcatcataggaaataatctgaggtgtagactcatttttcaaaatagcgctgacaattccctgattggaaactgctattttctcaatgggaagcgtcgtttcaatctccccctttaacccgttcttctgaaaaatcatgatcgtattgcctccgatgtctgccacggcaaatacatcttcattgatatctattaccggattttggatctgacaaggctgaatccacttttcctgattctttttattcagaaacaccacgccatctctgctatatcgaatcatgccatctgaaaatgcagcatactgattgctgtcttctgtattttttttataagagtccgcagttgtaacagaagtatatgtctgattttcaatcacaagacaggtgcctgtcacgatcataactgccacgacgatcctgattgtccactgccccaacacactctgtctgtgtcttttgacttgtcgtctgacgatctccatatcaatggatcctgaaaatggaaccctcggatttttcttttgcttcatatccgtccccttatcgctttgctttattttccgattatagcattattttacggtaatagcaatttctgccctacataaatcaaatttccgtctgtaattccattcatgcggcagatcgaatctacatgcgaaacatctccatatgctttcctgctgataattgcaagtgtatccccttgctccactacataaactccatccgatgcatcgccttcaccctgttcattgaccacctcctgactggtttcttcttcctttgcttcctctgacacagtttccttttccgacacctcttcctctgtcgttggactcgtcattgaatctgtctctgtcacttcttctgaagtctcctgtacaacctctgttactttcccgcttaccggctgtacgttttcctcatcggactcttgtaaaacagttgctgatacctgactcatcattttttgaacagctttcatcttcccgaaattatttagtgtcgtaactcccataatgactgcaaccaatatcagtatagaactcgccacatacatcagacggttgttttttttctgatgcgcccggcctcctcgactgcggaccatgttccgaaagtcctgagcagctcgatcctcaacagtttccgagggagacaccccatttttccttcgggatgcaatcatataattctgcatacatgggtttttctcataataagtatacctgcctccaatttccatcagatcattcaatttgtgtacaaagtacgactcttccttctctgcagaatccttcataacaaaaacagtattctgtttcgggaacgattttttatgaagtttcactatattgctcttcgcatccagttctactccgggttgtgcaacaaaccaacccaacatttctccgtcttcaaaatactgtttacagtcctcatatgcatttttccatgtttcatcgtcgatcacatactcattgcccaccagcttcaggtcgtgcatctgaatcgcaccgtatatgtatacatactcttcttcttcgctcctttgcatatcacccacaagaaaagcacctatcggtccatcctttgctttatcacagagctgaaggaaaaaggtgtctacataatcctccacataaattttcgggctgtcactcacgtttccaatctgacgaacattttttgggatttgtctttccatgctgtatatcctccttgatttcattgattttgcgaaaagcctgtccgcttcccgcggttcttttagagaatagcacacgaaaaaggccgattttatcacttgatgtcacataagttcgacaaaaatctcacccaaattttttctattttcttttcatactttcaaatgttccgcaatatttatccgtcagggtaatcatccatccctctttcgtatgaggaatactaaatatggtaaccggccacatatgtgcccgaatcacatctttttcgatatcattcaaagaaaacagacggcaggcatgatccaacgctttctttggatgtgtcagaccatgaaaccgctccccggtttcttttgcatgggtatgccagtcatagaggaacagatcgtggagcatcccgcctcttgctgcagatcttgcatccaaatgcaaaaaacggcaccatacataattgtaatacgacacatgaaggcaatgctgataacaatttgtatttccatgatgaggataaagtttcatacgaagcacaaccggatgtttcgcaatctcttcaatacattcgtaaaactcttcatcccacctctgtttcctcaacaggaactcttctttatgcctctttatatatcgcttttccagactccggatcatccgataccataatttcaagtttcttcacctccgaatttttcctgtatacacagctttttctttattatagcacgctctttttgggttcaaaatatttccggacatttttttcttttttgtagactatccacggattatatggtataaatatacaataagcaatcatttacagattctatatctgtaactatcaaccaaataaagagagggggatttttatggcattttgtaaaaactgtggcaatcaaattgatgacaatgcaacgacctgcccgaattgcggagcttctcaaaacacaactccacaagtaacggataacggaggttttctctggggattgttaggctgctgtattcccatcgttggacttgttttattccttgtatggaaagatacgaaaccaaagacatccaaagctgcaggtatcggtgcgctggtaggtttgatcatagccgttttatattatctgctgattgcagttgtcggtgttggatttgctaccatgggactgtaacattctatgaaaacctggatttacaagtggcttccgatcatctttggctgtcactgcaggagtgatcgttcctttttctggaaaggaacaccgtttccaatctgtgccaggtgtaccggagaactggtcggcatgattttatgcccgcttaccttttcactggtttcctggccggtctggacatttgtactctttatgtttcctatgattctggatggtatgattcagatgatcacatcctatgagagcacaaatacaaaaagatttctgaccggactattgtttggatatgcactggtccgcttatttatctgttccactatatggacgttccactttggctacaatctcgtaccaaagtaaaaatcccctcgctctgaggggattttttggttcttgttcttatataaatgctttgatcttctgataaatactctctgtatccagtccatattttgcaatcaattccagcgccggtccggattcaccatacgtatcgttgattccaatcttcatcacctgtgtcggtgctttttcagaaaggacatcacatactgcacttcccagtcctccgatcacagaatgctcttctactgtaaccacttttccggttgcctttgcagcttctacgatcagctcttcatccagaggtttgattgtatggatattgatcactttcgcatcgattccatctgctgctaatttctctgctgcttccagacagttggaaacaggaagtcctgttgccacgatcgtcaaatcttttccttctcttaaaacaacaccttttccaagttcaaacttgtagtcttctctgtcattgatcaccggaactgccagacgtccaaaacgcatataaacaggtcctacatgctcataagctgcttttactgccgctcttgcctctacatcatcagaagggttaatcacaaccattcccggaatcgttctcatcaaggcaatatcttcattacactggtgtgttgcaccatcttctcctacagagattcctgcatgtgtcgcaccaatctttacattcaatttcggatatccaatggagtttctgatctgctcaaatgcacgtcctgccgcaaacattgcgaaagaacttgcaaatgggacttttcctgctgctgcaagacctgctgcaactcccatcatgttactctctgcaataccgcagtcaataaatctctccggatgtgctttcttaaacactcctgtctttgttgctgccgcaagatccgcatccagtactacaacattctcatgcgcagttccgagttcggctaaagcatttccataactgtctcttgttgcgattttctttacatctgacataatgcttcacctactttctccaaatctgccattgctactgcgtactcttcatcgtttggcgcttttccgtgccatcctgcctggttttccataaacgaaacgtcttttcctttgatcgtctttgcaatgatcgctgtcgggcgtcctttgactgtttttgcctctttaaatgcggcatcaatctgatcaaaatcatttccatcaatattgatcacatggaaattgaatgcttcaaactttttatcgattggatatggggaattcacttcatcgatcgcaccgtcaatctgcaggttgttgttatccacgatcaaaaccagattgtccagctttttgtgtgctgccaacatggatgcttcccatacctgtccctcctggatctctccatctccaagaagtgtatatactctgtaatctgcattgtccagttttccggcaattgccataccaactgcggcggaaattccctgtcccagagaaccggaagacatatctacaccaggaatgtgtttcatatccggatgtccctgcagataagatcctgtatgacgcagtgtcttcagatcctcaaccgggaaatatcccctctgtgccagtacagaatacagtcccggagctgtatgccctttcgacagaacgaatctgtcacggtctgcctttttcggttcctttggatcaatattcatctcttcaaagtagagatacgtaaaaatgtcagctgctgataaagatccgcccggatgtccggcttttgcgctgtgtaccgctgtcacgattcccttgcggacttcatttgcagttttcatcaattctaatttgttcatgatttcctcctgcttttactctccgaaaacagctttgtaatcagcctggaatttttcaattccggcgtctgtcaacggatgatgtgtcatctgttcgatcaccttgtaaggtactgttgcaatgtcagcacctgcaagtgcacagtctgtaatgtggatcggatttcttacgcttgcggcaatgatctctgtatcgattccggcaacttcaaaaatctgagcgatctctgcgatcagatctgtacctcttacggagatatcatccagtcttcccaggaatggtgatacatatgttgcacctgctcttgctgcaagaagcgcctgattagcagtaaagatcaaagtaacatttgtcttgattccctcagcagaaagaactttacaagcctttaatccttctactgtcatcggaatttttacaaccatattcgggtggatcttggcaatctcacggccttctttgatcattccttctgcatctactgttgttgctttgacttctccgctgattgggccgtctacgatggatgcgatctctgcgatcacttcttcaaatacacggccttcttttgcaatcagagatggatttgttgtcactccacaaatcacacccatatcatttgcctttttaatatcctctacatttgctgtgtcaataaaaaatctcattgtctgttcctccttaaatttttcgtcgatttgttctgatttgattatatcgactcctgagaaacaggtcaatagacaacaaaattattagtaattttgccgtactaataatatcacattattaacaaaaaaactacttataagtttgattttgccttttgctcttgatttttattactaataatttacttttttgtactaatttttctttttttcagattcggatatccggttgttccccgcatcacaatctgaggttcatactcgacatggtaaatactgaccggttcaattcctgcatacggctcactgcgggccttgatcttcttcataatgatatcgcaggcatctcttcccttatagatcacaaaatgttccactgttgtcaaagcaatatggtgcattcgcgcaaacagcgtattgtcgcatcccatcaccgacatatcgccgggaactttatatttctcctcatacaacgcatccagaatcccaaatgcgatcatatcattcagtcccacaattgccgtcagatcctgatgttccctcagcaattcttttgtcagatcataaccgatccgatactccgaatcaatccccggcacatctttatcaatctgttcatcggctgctttgatcacaacgcgatcacccaatcctgcctcctgaaattctttcaaaaagccctctacccgtttggaacgctgtttctgccgcacagtaagcggcggtgcaatatacgcaacatgggtatgtccgagttccagaagatgttttgccataattctgccaagttttgagttatccagttctactgcatccacattcaaacgttcattctgattgttgatgaccacaaagggaatcttattcgacaactgctcaacgatttccataaaacaactgcttggattgcaggtatagatcacaccctgtggatttaaagagagaagcatctttaaatatcgctcctcaagctccagatctctttgtgtattacatacaaacagcccgaacccctgctccgttgctcttgcttcaattccctgcaaaagcatgacataatacggattggtcagattcgggcaaaaaacaaccagcagtttttcccggcggctttccttctgtgctctgcgttttggaagcacatatcctaattcccgggctgcatcctctactttttttaccacttctttggaaaaagaaacattgtacttcttatttaaaatcatagaaaccgttgtctgggaaacaccggcatactttgccacatccgaagatgtcactctctttttgttcatgatttctcttccctgtcctgttaaagttctgttctgccttccagtgcacgcagaagtgtcacttcatcaatgtattccaaatctccgcctaccggaactccgcttgcgatcctgctcactttgattcctgtcggcttgatcagtttgctgatatacatcgctgttgtctctccctccaaactggaattggtcgccacgatcacttcatctacatcctgctggagacgctccatcagctctttcaaacggatatctcccggtccgatccccaacatcggagagatagccccatggagtacatgatacactccattgtattttcccgttttttcatacgctgccagatctcttggtgtctctactaccatgatggtccgctgatctctgtccggattgctgcagatcgggcaaagctcccgatctgtcaatgtacagcactgtgcacagtatctcacattgtttctcgcatccacaatagactttgccagattctccacctgatctttcggcatattgatgatatgaaatgccagtctctgcgcggactttgcaccaatccccggaagacgtgaaaattcttcgatcagcctgctgatctgattactgtaataatccattctgcctcacctctgtccggattaaaacattcccggcattcctccgccgagtcctccggtcagtttggacattgcagagctggattcttcatccactttgcgaagtgcttcattcgcagctgccacgatcagatcttccagcatttcgatatcgtccggatccacgacttcttctgccagtttcactttcaggacctctctttttccggaaactgtcacctcgacagccccaccgccggctgttgcagtaaactcttttgcttccagttcttttgcctgttcttccatctgacgctgcatcttctgtgcctgcttcatcagatttgccatgttccccggcattcctccaccaggaaatcctcctctttttgccataaattaatcctccactataatctccatattgatcttcttctcaatatctacaaatgtatcttcgaaccgccgaccttcttctacatgacgtacttctacttccacttttttgccaattctgttttcgatcagactctccagttctttgcgtcgttcttctgccccgacaaaatctgcccccaacgcatccggcatcacgatcatcagccgattgtctcctgcaagacttaacctggcttttttcagataggtccggagcatcccggatgcctcgtcagcaatcggtctgaaattcttcacaacctgctgtacatcctccggcacagcatttggaagttctggttctggtttgggatccgttggtatgtttccatcttcttttacataaaccacacgctcttgaactcctgatgcagctccctgcgccaccttctcttccagtgcacgaatccgatccagaatggagtcctgcctggtctccatggcaggcgtacaaagcttgatcaaagcgacttcaagaagtactcttttttgcgctgcgtacttcagttgtcccgacaattctgaaaaaatccgaatataacgaagcagcatatcaggctctgccatactggcttcttcccgaagctgctgcatattttctgtagatacatccagaacatcctctatattatcagatgtcttcacaagaagcaagttccgcagataccatgtaaaatctgcagccagctgtgtcagctcccgtccttgcatcaccaggtcatcgacaatattcagcacctgcggcacatctcttttgatcacactgcgcagaagtctgctgaacacatctgtgtcgaccgctccaagtacttccagcacattatcatatgtcagcttctgtccaagataaaaagcaatacactgatccagaaggctcagcgcatcacgcatggaaccatctgccgcctttgctatataacgcagtgctttttcttctacttctacctgttcttcctgcatcagatcccgcatcctgcccgtaattgtctcgatactgattcttttaaaatcgtaatgctgacatctggataaaatggtaatcggaattttatgaacctctgttgtcgccaaaataaagattacgtactccggaggctcctccaatgtttttaacagtgcattaaatgcccctatggacagcatatgcacctcatcgatgatatagactttatactttccttctgtaggccgatatgccacctcttcccgaatctcacggatattgtccacaccattattggaagccgcatcgatttcgatcacattcatcgatgttcctgctgcgatcgaccgacacatggcacattctccgcagggacttccgtttaccggatgttcgcagttgaccgctttcgcaaaaatcttcgcaacggtcgtcttgccggtacctcttgttccgcaaaacaaatatgcatgcccaatcctgtttgcttcaatctgattttttaatgttgtaataatatgttcctgtcccttgacatcctcaaactcaatgggacggaattttcggtaaagcgccgtatacgacatgtatcacacctctgttttccaagtcttttattgatctccaaaactgatgccgatcgtccttgcttctttgataatgccatcttccggatcaaccatcttcaattttccagcgacatcctgaagcggtactttcgtaatcttctgattcttcatcgcaaccatatagccatattcctgattcaggatcaattctgctgcggctgctcctactcttgttgcaaatacacgatcatatgcacatggagaaccgcctctttgcgtatgtccaggcactgtaattctgacttctttgtctgttttctcctgaatcttttctgccagttcataagcaatggacgggtatttccgttttgccagtttttctttatattcttttttcttcagtttggcatcttcttttgaaatcgcaccttcagccactgcgatgatggtaaatcgttttccttctgctgctcgtttctggatcacgtctgtcacgacattgatatcatacggaatctccggaagcagaatcacatccgcaccacctgcgattcctgcatgcagtgtaacatgtcccactttatgtcccataacttcaataatgaatacccggctgtgagaggttgcagttgtatgaatccggtcaatggtatccgttgcgatatccactgcgctctgaaatccaaatgtcatatccgttccccacagatcattgtcgatcgtcttcggaagagtcacaacatttagcccctcttctctcaggagattggctgtcttatgcgttccgtttcctcccaggatcaccagacagtccagacttaatttgtggtatgtatgcttcattgctgccactttgtccagtccatccttatccggtacacgcatcaacttaaacggctgtctggatgtaccgaggatcgtgcctcctctggtcagaatcccggaaaaatctttggaagttaacatgtgaaaatttccatagatcagacccttatatccatcctcaaagccataaatctccacatcatcacgctttgtgcatactccttttacaaccccgcgcatagcagcattcaaagcctgacaatctccaccacttgtaagcattccgattcgtaacatatccgtatcctcctactctagattttatctgttccacatcaaaatctgatgccaaaagactttattttctgttttatcttatcacaaacagaagaaaatgaacagatttatcttctcctgtgaactttccgattggtaatttcttttccattgtgttagaatatacacagcataaacaaaatagatttgaaggagatagaaaaccatggaaagaaatgatccctgctggtgcggcagtggcaaaaaatataaaaaatgccatatgccgattgaagaaaaaataaaattacacaaagacaaaggagagattgtaccatcccggaaacttttaaaaactccggagcagattgaaaaaatcaaaaagagcgccgctctcaataccgctgttttagacgaagtcgcagctcacattcatgcagggatgagcactgctgatattgaccggatcgtctacgattttacaactgcacacggtggaattcccgcaccactgaactaccagggatttccaaaaagtgtgtgtacttctatcaacaacgaagtatgtcacggaattccggatgaaaacatcatcctgcaggagggagatatcatcaatgtcgatgtatccaccattctggacggctatttttcggatgcatcccgtatgttcatgatcggagaggtatctgagcgtgcgaaacgactggtacgtgttaccgaagaatgtgtagaacttggtcttgcagccgcaaaaccatggggacatctgggtgatattgctgatgcgatcaacacacatgctcagaagaacggttactctgttgttgtggatatcggtggtcacggaatcggtctggaattccacgaagatccctttgtcagctatgtcacaccaaaaggaagcgagatgctgctcgtaccaggcatgatgtttaccatcgaaccgatgatcaacgagggaagtcctgacttctttgtagacgaagacaatgactggaccatctatacgattgacgacggactttctgcacagatcgaatatatggtacttgtaaaagaagacggcattgaaattttaacaaaataaatgaaaaggttctcctataaattacacgaatctatagaagaacctttttatttcatcagcatatgcagatatttttcatactcgacaccatcgttgcgtggaatcccttcctttactgcgtctgtaattgcgttctcgataaaatttcctgcaagctccatcataaattttaaattatcacctcttgccaggccgcccgccaatatcgaagcaaacaaatcccctgttccggaataactccctcccacataaggaaaagctgcaagatgagtttcttttccggtcactgcaagatttcccatcttctgtactccatccgtctgatcgcaaaactgaattcccgttaccaccactgtcttaggtccattctttctcaagttttccgccagctgccggatcaccgtaagaagatgtttttcatccgtcatattctcaatcatccgataatccgtatccgtcaggatacaaagctctgtcaggtttggtgttacgatatctgccatctttgcaagttcccgcatttttctgcagaactccacagaaaacaaatcaaacttatatccctgatctcccatgatcggatctacaagaagaaacgttttcttcttgtgaaatgtctctgcaatccggatcatgtgatcgatctgaccttcatccgccgcaaatcctgtatagattccatcaaaccgaacccccatattttcccaggattttcggaatggttccatctcttctgtcaatttcacacaatgataggaatcatatcctgtctgcgcactcaaaacggctgtcggaagcggacatgcctgcactcccattgctgagagcacagatatcgccgctgtaagagagcatctcccaaatcctgacagatcattaattaccgctaccttttttaccacattcatccacctgcacttttttgactggtttcatgatcaggacagaatgttttcccatattgacaaccgtctctccatcttccaccagataaatatctcgttctgttgtataactcttttcccatgaatacatcaggcgctccatctttcctttcatcggaacaccggcctgccataccgggatcgtgacttcttttaattctttgctgttgtttaatacaacgacaatctgctcatcttcctgaaatctcgcataagcaagaacattcgacgaccagtacagcattttgatagaacctgtacgtaaaggcttctcgttcttatgaatccgaatcatctctttatgaaattccagaagctctttgttttcctgtccccatggatagactctccggctgtccggatctgtaaatccgcacacccctgcctcatctccataataaaccgtcggcgctcctacccaggtcatctgaactgccacagcttctctcatcaccgcaagattgattccttcttccgccgccttgcttccaagctgcgcaactcttcccgctatatgattcgttcttgtaaggaatctggaatgatcatgattcgacagctcattcatcgccacctgcaaggatggggtaagcatgcttgccataaagtgattcatcgtattgacaaagttgtctgcgttgccccacagatccactcttcgctcgtcgctgtgcttttccattcctgtcaaaaaccaggtcagaggctccataaaagcatcatagttcatcacactgtcccattcatctccctgaagccagtctcccggatctccgtaatgctctgccaggatcaaagcctgcggattggcgcttttgactgcttttctgaaattttgccagaagatatgattgtactcattgctgtatcccagatccgccgccacatccaggcgccatccgtcggcattataaggtggtgacacccattttttcccaatatttagaatgtactcctccaactttggagaatcttcataattcagcttcggcagtgtatcatgtccccaccagccatcatagttcttattataaggccacgcttcttccctctcatcaaaaaaatggaagaagtctctgtacggacttttggtactcacataagcacctttttcatattccggctgctgctcataaatccgttcccgatcgagccatttgttaaatgacccgcaatgattgaatacaccatccagaatgacccgcattcctcttttgtgcatctcatctaccaaccgtataaacaaccgattgcttgcttccagattccgcatgtttcctgttcgtttctggtactttgtagcttttgtattgtcttttccaccttccggaagaatctctcccccatcttccacgatcacaccatagtgcggatcgatgtagtcataatcttgaatatcatatttgtgattcgacggagaaacaaacaacggattaaaatagataacttcaactcccagatcttccagataatccagcttatccagaactccctgaagatcccctccatgaaatcttcggatgtccatagccgcaggaacttcattccattctttcactttgcaaaccggctctccaatataaacatattctccatcctccacatcattggatggatctccattgcaaaaccgatccacaaaaatctgatacatcacagcacccttggcccattccggtgtagaaaatccaggcatgatccgaaaatcataatattccaccggattctctgatacaccgcattgatgataatacacgattttcccctcgctcttgatctgaaagcaataagaatacatcgtatccgccagctgcacttctgtttcataataatcaaatacttctccggaggataccttctgcatctgctgtgtttttccccccgaaatcagacagacttcctgcacatcatcttttgccgttctgaacctcagcctgactttttcatggatacccggttctgcaggtatgacataatccgatgtcccatcgcagaacagcgcatttttattcatataaacctcctttggggcaagccccttaaaatgccgatctgacattaaaaacagcttgccccattctacactctacttctcaaaaagcgcttcaaactcgcttcttgtaatcttttccttttccagcaacagctgtgcacaagattccagaacatcctgatgttcttccagaattcgttttgcttttgcataacactcatcaataatacgcttcacttcttcatcaatcgttcctgccactttttcgccatatcctctggatgtatgaccaaagtcacgcccgatgaaaacttcatcactgtcattgtcgtagttgatcagaccaagacgctctgacataccgaacttggtgatcatggactttgcaattgcagttgcctgacgaatatcctgtgatgcgccagtcgtaatgtcatcgaagatctgctcttctgctacacgccctccaagagaaacggtgatctcctgaagcatatgtcctttggtgttgaacatatcgtcgccttccggaagcggcatcgtatacccgccggctcctcctgttggaacaatagacacactatagaccggtcccacatccggcagtacatgaaagagaatcgcatgtcctgcttcatgatatgctgtgatccgacgttctttttccgaaaccacacggctctttttctccggtccgattccgactttcacaaatgcatgacggatatctgcctgctgaatatacactctgttttctttggcagccagaatcgccgcttcatttaaaagattctcaagatctgcccctgtaaatccactggttgtctgcgcaatctgtctcagatccacatcatctccaagaggcttgtttcttgcatggactttcagaatctcttctcttccttttacatccggacggcccacgacaacgtttctatcaaaacgtcccggacgcaggatcgccggatccaggatatctttacggttggtcgctgccattacgatgattccctcattgacaccaaaaccatccatttcaaccagcatctggttcaatgtctgctctctctcatcatgaccaccgccaagaccacttcctctgcgtcttgctacagcgtcaatctcatcaataaagataatgcatggggcattctttttggcatcctgaaataaatctcttaccctggatgctccaacaccaacaaacatctctacaaagtcagatcccgaaattgtaaaaaacggaacccctgcttctccggcaactgcttttgcaagaagtgtcttaccggttcccggaggcccctccagaagtactcccttggggatccttgctccaacttgtacatattttttcggagatttcagaaaatctactatttcctccagttcttccttttcctcctgaagtcctgcaacatccgcaaatgtcacctttttatcattttcagaactcatgcgggcacggctttttccaaaattcattgccttggcattcgcgccgccattctgtcggttcatcatcatcgtgataaacataaaaccgacaagcatcagtactacaggtaagaccgttgtactcagcactgaatcctgtgggacagcacccagacgatactctacctcatttttgtccaacaacttctgtatctcattcacatctgatacattgacacgtcccgcagcctggctgtcctccagtgtcaatgtgaccacacctgtcggcactgctttgttctgactgatcacaacatctgctacattgtcatcctgaacctcctgtacaaactgtgtaaaagtcatctcctgtccatgcatctgcacacgacttgtcatccagagtacaaaaaagatcacagcaataaacacaacgactgttgtgccgcttatgcctttatacttcttatcattcaatgatactgctccttcctactccacaccttctacaactccgatgtatggaagatttctatatttctgcgcatagtccagtccatatccaactacaaactcgtccggtatctcaaatccgacgtaatctacttttacatctctttctcttctctccggtttatcaagaagtgtacaaagatggatactctttggatttcttttcttcagaacatcgatcagataatacaatgtacggcctgaatcaatgatgtcttctacgatcagaacatctttgccctcgatcgattcatccagatcttttgcaattctgacaacaccgctggatgatgtcgcatccccataactgctcacacacataaaatccagagaaaccggcacactgattctttttgccagttcacacatgaaaaatactccgcctttgagtacacagatcatatggatctgttttcctgcgtaatcttcactgatctgttttcccaatgttttgattctttcgtttacttcttcctctgaaaccaatactttaattgtctctgccatgttttttatcctccattattttgatctctattatcctttttgtctgttctgatatctgatatctgctgctcattcgatatccaacaacccacaaaatctgatgtccctctgtgatcagcaaaatctgattccggatttttgcaggaattttttcattgataaaataagctttcagcttttgtgtaccaccatcatgcttcacgcacagaacatcttccgactgcctcgttcttattgtgagactgtcttttattatatcatagtcaaaccatttcgtgtaggggttttgcggtatctgttctatcgaaaaattcgcatctttttccagaattgtacaacatatttgcagatttctgtcttttaatcgtgtaattccaggtattgcaaggttttcctgacataacatctgtttttcttgtactttttttgtcagaaccaccccttcgtagtttcgttctgctgagatgtgatacggcagatttctcatttttccactctgtttctcaaacaaatccgccacagccgccacatgcacagacgtgagatttttcccggtgcctgccagcttttccagacaattttgaatcatcccgttttggatcaccggatgacacttgatccagacatccttttggatcaaaaaagaatggtcctgttctcttactgcctgtgcgctgtatattttaagttcctgatccaaatagtcccgaatctgattcagttgttccatcacttcattcatatggcggatcgtctgactgttcacctgttcttccaataccggaatcacccgatgccgaattctgttccttgtatattcatcttctgcatttgtctcatcttcacaataggaaagatgatgctctctcagataatactcaatttctcttctgtttattccaagaagcgggcgaatcatgtatccattgacaggccgaattccggaaagcccccggattccggttcctcttgccagattcatcagcatcgtctctgcattgtcgttctgatgatgtgccagtgcaatctttgttcctccataacgacacctcacctcttcaaaagcatttcttcgcaccatacgcccggcttcctctactgacattttttcccgggcagcaatttccctgacattctcatggtatatgatacatggaacactctgttctctgcaaagttcttctgtaaataactcatctctttttgcactctctcctctcagtccgtgattgacatggaccgcaatcaatccaaaaccgatcttcttctgcagtcctgaaagcacaaaaagcaggcataccgaatctgctccgcccgatatccctgcgatcactatatccttttcttccaacatatgatatttttcaataaaacttaaaattttcttttccatattgtaaactataccgaatccttgcctaaaatgcaagtatcctgacagttccagattcctactgccaacaccgtcatgtcatccataggctcttccccggtccagtttaaaacttgttccaaaatatgatgcgcgagttctttcggattcccaccagcagtgcctttgatgattgtttccatgataaaatcctgttccccgacaggcagagcatccaaaacaccatctgtaatcatgatcacaaaatctccatcctccagcattctttgtaccgattcgatctctatggaatgcataactccaatcggaagactggaggaactgatgcgttccactttatccccttttttaatatatgtcgaagatgcccccgccttgatcaagtggcattctcctgtatacaaatcaaacatactcagatctaccgtagaaaaatgaatttcctctcttccgatcgccaatgttgtattgatcatctgaattgctgactttgccggaaatccagcttctaacagttcttccaacagttccatgaccaatgtactctcccggcaggccttttccccggatcccattccatccgaaagcgccactgcaagctgccctccgccaagctgccgcatcataaaattatcccctgaaatcttgctgcagtccttaccgatccttgccactccatacagcgtataaaaggccggtccttccatgcacacaatcgtctgataatccttccccagcacaatggcctgatcactttctacaacaaactgacgtctcatcacatcggaaacagccctggcaagcgctttggtcgtaacacaagtatttttcatagcttttgcagtgagatggacctcatattttccttctttgtttaagaaaaagcagatatgtaatacccggattccttttcgtttcaagtgtgctgtcatctttttttccagacgttcatccgaaaaaagacttttttccagctcatttgcagtactgcgaatcatatctgcaaacgtatccatctgaaccgcacacccttctctgccaaatacaatccgattattccacatcatattctgtcttgcatcatgaaatgcccctaacatttcttttaaaaacagttcccagcacagacatctctgctgaagttttcttttggtttctgtatttaactcactcccataatgatcgactgcagataaaatttcatatcccatctgatacgtatgtacaaaatcctcttcccagcaccaggaatacttctcacagtttctacaggcattttcttttgcccggtcaaacatatctccgatttcctcattggaaaatgcacgttttttctcctctaaatgtaaaaatgtcctggaaagctgtttgatggaatccgcatatttttcaatttgtgttacatagggactggtatgcagtgcctgtccatttttcatggtgatgtcctccgataatgtatgatattaaaacacaaaaagccccaggaattcccggagcttctcttttgtatcgtcactattttgccggtctgaaaatgatctcatttggatccaccagacctaatttttcttctgcaacctctttcacgtaatcatccgtcttcacatacgcttcgtatgcttctacttctttggtacgctttttctcttctttaatctgtgcttccagctctgcctgctgcttcttgtactgtgcatttctgttacgcagagataccgcattgactgcaagtactcccactagcaatacaagaatcatactgatcagcatcatacttcttttatgatacctccatgcagaattcgtcttccggctttttgccctgccattgactttctttttccgaatcgccatgatactcaccctatcgaatctaacttctatttccattctgcctgtaaataaatctgattaacatagatattctatctgctttctccccttttttcaagagattcccttgtttttgtcaagattttattattttttcaccttattgaaaattcctttcaataaacgttgtataccaaaagcaaataccaggccggccccaattcctaaaacaaaaaaccagcgaatactcccataagtcgtacaatacatctgacgaaaaatataggcgctcgccaacagccaaaatcccaaatcgcctgcgccgatcacaaccggatgatgatgtacgactttccgcatcagcagcaaaattttataactgcaaaagagcacctgtcctgtaagtactgcatacaaaaagatcacaacttctgtttcaatccccagcatcataacagcgcctacttaaataattttgacagaaagctctcgtttggtccactctgattcactccagaataagaaatgctgtcaatatttccggaaaggtctacttctcccttctcaacactgagccggttcacatgaaggtctgttcctttgaccataagcatcccctgctctgtttccagaagaatctcattcagatcaaaagagagaacatccagaaccccggtgaccatacttgtctttctattattcacgatcagtttatgcgcctttgccggcatttgtcgctcttccatatactttcccctttccttctactttccatccctatccaggcatcccataatttatgcctgcggcgggcagacttcgtctgacaaggtatacctatccaggcatcccgtaatttatgccttcggcgggcagacttcgtctgacaaggtatacctatccaggcatcccgtaatttatgccttcggcgggcagacttcgtctgacaaggtatacctatccaggcatcccgtaatttatgcctgcggcgggcagacttcgtctgacaaggtatatatatgaggggttgtattattttatgcagaaaaagtggatttttctgtcttataaatagcgaaacaactcttttgcttcttcttttttggttgtatcctgaatatccagtacttctacttttactgtttttgtgccaaactggatttcgatcacatcccctatcttcaccttcacagatgcttttgcaggctttccattcaccagaactcttcctgcatcacacgcctcgtttgccactgttctgcgcttgatcaggcgggaaacttttaaaaatttgtctaatctcatatgtcggctcctccattttcctataattgaaaagagaatacaaccggcctgtccgactgtatcctcttcgttttctttatctttacatcaattatgcatttacagcatctttgagagcttttccagctttgaatttcggagctttgcaagctgcgatcttcattgtctttcctgtctgaggatttcttccttctcttgctgctctttcgcttacttcaaaagtaccaaaacctactaactgtactttttctccttcttttaactgctctgtcactacatcaacaaaagcttttaatgctttttctgcatctttcttagaaatttctgcctgctcagcaattgctgcgatcaattctgttttgttcatggataattcctcctcgttattatgctagaatgattattctaaattggtaaaggccgcatgtctctaccctttacatgtcgatacccttatgtactgttataactggtgaaactgcttttgtcaagcagtttcacagatttaccgcgcaaagcggatctttacataattttatcgatcattgccagcacttctttccccatagctgcggatttttcgtctgcatctgcaagagaagttcctttgattccataatagaattttacttttggttctgttcccgatggtcttacacacagccatgctccgtctgaaagatcatagtacaatacattggatgacggaagtccggtagcggatacttctcctgtctccatatctttgatcgtatctgctttgtaatctcttgctttcagcactttatatcctgcaatctctgcaggtggatttttccgaagtgtctcaagaatctcctgaatcttggcaagtccctcaattcctttgagtgtaatagactggatatcatctttataatatccgtatctctcatacatctcgatcatcgcatcccaaagtgtcatatcttttgtcttataataagcagctgcctcacaaagtgccatggtcgcaacgattgcatccttatctctcgcatgtgttccgatcagacatccatagctttcctcaaatccaaataaatactcgccttttccgctcgtctcaaatcccaggatctgctgtccgatgtacttaaatcctgtcagaacttcaatcagccctgtctgataatgctctgcgatcgcatccgccatattggttgtcacaatagtcttgatcagatatccatcctcaggaagtcctttctgtgcttttctctgtccgatctcatagtctgcaagaagacatcctgacatatttccggtcagatcatgatattcgccgtttttgtcttttacacgtacaccaagacggtctgcgtctggatctgtcgcaagtacaatatccgcatcaatctcttttgccagcttcagtcccagttcaaatgcctctgcagcctccgggttcggatatgaaacggtcgggaactctccatctggcagctcctgttcttttactacatatacgttctcaaatccaagttctttcaggatccggcgagccggaatattaccggttccgtgaagcggactgtatacaatcttcagctcttttccaactgcatcaattgcatcctgatgaatcacctgttttttcagttctgctatgtaagcatcatccacttctgctccgatcacgtcatagagtcctgctgcctttgcttcttctgccggcatcgtcttcatcgtcgtatagtcttccactgccttcacttcatccataattcccttgtcatgaggcggtgtgatctgcgcaccatcctcccagtatactttatatccattgtactccggtggattgtggctggctgtgatattgattcctgcgatacagccaagctttctgactgcataggaaagctccggtgtcggacgcagggaatcgaatacatatgctttgatcccatttgctgccagacagcaggctgcttcctgtgcaaattccggtgacatacggcgtgagtcaaatgcgatcgccacaccttttggagtctgcccactctttaaaatatagttggccagtccctgtgtcgcttttctgactgtataaatattcatgcggtttgttccggctccgataattccacgaagacctgcggtaccaaattccagatctgtataaaaacgctctttgatctcattctcatctgcagcgatactttctaactctgctttggtatctgcatcaaaataaggatttgtcagccattcctgatatgtttctttgtaacccattttaggcacctcctgcaatatagtatgtttctattatacaacagctgcctataaatgaaaagtgaatatattctctaaaaatcgctctttttctgcctgttggccaattgcagtctgcagtttttccacacttttttccggaatccgtgccttattggaatttgaatacagatttgccgttttccagaacttttccggataggaaagacaaagtccaaggaattccttttcccgatcttccagtggacgggcgctctcatacatctccagaatctttctgcccaggctttctttccactgatgtttttccatgactttgcgcagaaaatagtataaatcctgtacctgtacatccattctgaaatgttcaaaatttgtaactgcaactcttccggaaccaatccagatattgtgataattataatctccatggatgagttttccagcttctatattgtcctgatataactccggatatccggaatgttccatacgttccgttaccttttgtgcaatttcatacatttgttcaaaatgtgtcagaaattgacgctcaaattcattttttgtcaccctggaacgaataaaagcacgtacctttttcaactctcgattatgccgttttaattctgaaagggtgtcccgccccacacaaggcttgagttccatctcaaaaacagggggattttccgatacttcccaaatcatatcctgtatactttcttttgtccagacaccctctttgagcacttctccccattccattctctgatgcaaaagtccgagcgcctgcgcagattccagtacatcccgttctcttcgtacttcacattcccttcccggaacccactttttcaacatatattttattccgtccgaagatacactgaacagttttccttcttttgtaaataccggtgtatccacctgcattccatgtccggattccagataactgagcaaaacatacatcagaggcgctcttcccagcgagattcctgccggtgcgaggagcatcatcccctcctttgtatcgcaaaaataagcaccccttgtcttgcgggtgcttattacttctatgtcatactgttccagaacttctaattcatattctctcatacttgccccctgcactttaccccgccgaaagcagggcggattcataactctttctaatctatgaaccccgacaggcaagtatgctaaaagccaaatctttctttcacataatcacacaatttttctttttgattccatgccggatcttcaatcaccacatccagcaattcatttaaaaccgttcccagttcttttcccggagtcatccccagatgaatcagatccgtccctgtcactgccagatcttttagatctacacactccctgtttcgcagtgcattctgatacagctcccggatctggatgatattctccagcttttctcttcgtttatatgcactctgtgcctttgtatcggcaagccggactgccagataatatgggaacaattctacaccgatcagatgcatcgcacgacgtacatttgctcccgtcggttccattcgataatcatgatatgcaaccagtttcgtaacctttctgagcgtatcattgtcaaatttcaatcgtttcattaccgttcttgcaatctcctcgctggcaatcgcatggcccttgaaatggtctcttccattctcatccgttgtcttcatcactggttttcccatatcatggaacagcattgtcaatctgagaaccttatcattttttacattccgcaatgcatgcagtgtatgtgcagccacatcatatttatgatgcggtgtcttctgcttcacaccgaccatggcatcccactcaggaagtatcacttttgtgatgccaagctcacaggcatcctggatccgttccggatgatccgataccagcagttttaccagttctgtctgaatccgctcggcactgatcttctccagattcggcgccagacttttgatcgcttctgcggtctccggttcaatcgggaatgcaagctgtgcagaaaaacgcactgcccgtaaaatccgaagcgcatcctcggaaaaacgctctttgggatcccctacacaacggataagatgataattcagatcccgcatcccgccaaatgtatccacaagtcgttcttcatcattatatgccattgcattgatcgtaaaatctctccgcttcaggtcttcttccaactgactggtgaatgtcacttcatttggatgccggccatcctcatacagtccgtccactcggtaagtcgtcacttcaaacccgtcttttccgatcagaacggttaccgttccatgctcaatcccggtatccacggtacggcgaaagatccgcttcacctgctccggtttggcagaagtcgtaatatcccaatcctcgggctgtctgttcagaatggaatcacggacgcagccgcccaccgcatatgcatcataaccatgtctctgcaagtttttaataatcaaaactacttttctcggcaattctattttcattgaaaatcttcccctttattttatgatctaccctgtctttccatttcgatctcatgtaaaatttcgagttcacgtttttggcaactaaatattataacctgtcttgactgttcgctcaaccattttagcgtatattttagtcttttttcatcataacaaccaaatgcatcatctaaaatcaccggaatttcttctccgtacaagagttctaacgccgccatgcgaagtgcaaaatagacctgttccactgtccccctgctgacacgttccaccgggatcctccgtccatctgacagaagaaccagtttcagatcctcttcgaccagaagtcgtgcataagttcccccggtcacttctgtgagaatttcagatgctttctcgttcagtaccgtaccaaaatcttttgacatggaagctgctgccttttccattgtctcagatgcaatttccagcgcctgttctgtcttttttaagcgtttttcttcttctccaaaagtatccagttcctccagttgctcttttaaacgattcaaactgatctgtttctctttctgttcctcactgatacgctgcagcgtccagtggatcttctgttttttctctctgtaatcagattctgctgattctttttcctgtatctggatatttttttgtgtctgtttatgtttcacaccccatacaagaaataaaacacttgctatcgccggaatcactgcataaagatcgtgtaatatcacactgactgccagcaaacacaccgccgggatccactgccaactgactttatcattctgctctttccatccatactctggttttttcaactctgtgagctgccgtttcttttctatggtttctgattccaaacgcattttttcctgctgaatgtactgatacttccgctgaagagcctgtcttttttccgcttttgtcaactccagctgtttccattttcgggatatttcttttttacgctgtttcaaacactcctgtgcacctgccagatctactccactgcttccggtttcgtaataattggctgcatagttctggagctctgctgccagactctgtccaggtcttgcgcccagttgtccaattgctgcggtattttcaaactgttctgctgtcagcccattcaacaacatatccaaatctccgcattctacggacagctcttcgccatcatcctcacagatcagtaccgcccccctggtataccgatcaaaacgccgcttgagacaaaacgttttctcactgcatgaaaaacgcatcattcccgcatattcattgggattttcccaaggctcaaagcgactgaatgcatcattgtgcgctgcttttccacgacctcgctccattccaaacaacatcgcttttataaacccgtaaatcgtggactttccaaattcattctctccatagaaaatctggattccatcttcaaacacaaatctctgattggaaaactttccaaaattcttgatctcaagttcttttatcttcatgtcttctcctattgccgatttgccatcaatgcctgaaccccttcacaaagtgcctcatattctacactccctgtctcacacccggaaaatgcttcgatgtattttccaatcagattctcctgattttccttccataattgtgcaaagtcataatccggaatcgtctcgtctgcgatttccagaatatttccatatccatccatggaatccgtatcaaattctatttccggatctcgctttcctgtgagtatgaatttataaagatgttccctgccattcttatggatctgttcccggatcaattcccggacttgtgcatttcccattctgctctctataggaagtgtaagatgcacatactctctctttgccagcggaacaaattccacctttctccccttatccgaaaattctccctttataaatccatgctttcctgtatcgttcttatcaatgggctccaatgctcctgcgtatgcggcaaccccggaaataatctgctgtggcttatggatatgtcccatggcaatgtaatcaaatccacttttttccaacaatcttttctggatcggaagatgtttttcatctcctccatgaatcagaagaatctcatatccggcatccccttctgcacggatgcctccgtcaaaaggtgtcagtatctcctgcgattcatagctaaatccagtcactgccacatccagatcttcaaaaataatgcattccggctcactgtcaaataaaggataaacattacggctccacgaaaaattccggtaataggaatccggctttaaaaaatcatgattgcctgcgatcaaaacaaccttcgtccgggagagctttgaaaaataatagttcacttcttttaattcttttttcagtggctgcctgtggaacaaatcgcctgcgatcagaagcagatcgatctgctctctttcgcagagatcgatcacttctgcaaaagtatcccataattcctgcggccgtactttcgaatatgcctttcctgcatccggagaagcccccagatgcacatctgcaatatggatccaccttaccatgtccttccctcctgtctcttttatcagcaaagagggtgctcaaaagcactcagcctttggtcaccctctttcaatttccttatcgattccttctgaaatcttataaatcacagttatttaccgttcttgggaacggaatgacatcacggatattggacatacctgtcagatacatcacacatctttcaaatccaagaccaaatcctgcatgtcttgtagaaccatattttctcagatccagatagaacttataatcttcttcattcagatccatctctgccattcttgtacgcaatttttcgaaatcgtcctctctctggcttcctccgatgatctctccgattccaggtaccagacaatccactgcagcaactgtctttccgtcatcattctgtttcatatagaatgctttgatctcttttggataatctgtgacaaataccggacgtttgtagatctcttctgtaagataacgttcatgctctgtctgcaaatctgttccccaggaaactttatattcaaacttgtcattgttcttcatcagaatgtcaaccgcttctgtataagtcactcttgcaaaatctgagtttacaacgttgttgaggcggtcaagcagtcccttgtctacgaatgaattgaagaaattcatctcttccggagcattttccagaacataagagatcacatattttaacatagactcggccagatccatattatcctccagatctgcaaatgcaatctcaggctcaatcatccagaactctgccgcatgtctggtggtattggaattctcagcacggaacgttggtccaaatgtgtaaatacttctgaatgcctgtgcaaatgtctctccgttgagctgtccactgactgtcagattggtctcttttccgaagaagtccttgctgtaatcgatacttccatccggattcttcggcacatcttttaagtccagtgttgtcacctggaacatctctcctgcaccttcacagtcacttcctgtgatcagtggtgtatgcacatagacgaaccctctttcctggaagaactgatgaatcgcatatgcgatcatagaacgcactctgaatacagcctggaatgtattcgttctcggacgcaaatgagagattgttctcaaatattcaaaactatggcgcttcttctgcagcggataatccggagctgaagctccctctaccgtcacttcatctgcctgaatctcaaacggctgctttgcctgtggtgtcgctaccaatgtacctgtcacaatgatcgctgctcctacattctgtttggagatttcctcaaaattctccattttgtcatgatataccacctgcaatggttcaaaataggaaccgtcatttactacaataaatccaaatgtcttggaatcacgaatgctgcggatccatccccctacagtcactttctgatccagatactgctctctatttttaaataattcccgaactgtcactaactccataccgctcactccttcttctcaaatctgtctctgtcacaaacggacattcaataaaggatattataacatatctcctatgcttttgtccaccggtgtatcgtgtcagttccgggactgcacaattccagagcagtatgatcttcgctgagtgtatactcatattccagactgccgccttccatgaccagattcagcttcaatgtaccctgggcatctctgacaacgccaaacgttccctctgtttttcctgaagagcctttgatcagagcgcttccgtctttcttcaggatatattcattttcattgccatccttccaggtgccaagcagtccctccgcttccttgtccgacagatccaaacgttctatatctgactggaacagctccatatccttaccgccgtccagtgatcttagcttcaaaccatatcctgtcgtgtcattctcaattgcatagatctgctccttctttgcactctccattttgattcctattgtaatgttgttatcttcatcgaatccacattcaaatgtcaatgctttcccatccattgttccggttccatcttctttgaagtcatatatggaatccgttccgaccacatcccacttcttggccagtacttttgttactgcctcactgggcaggatataaccgtcacccaatttttcttttaattcactggatgcctgatctacttcttccgttttggatgctgccggtgtatcccctgtcttattcccctggcatcctgtcatcatgattgcagctgacaaaagcagcgctattgctaattttttcatggtaattttctcctgtttctgttcgtttttcatctacgaataaggataccataagcacagctttttttccacttttaacagaatttctgcttacttcattccataccacacgtactgatttccataaaggtttgccaaacttcctgtaacaatcacatccagttcattttttccaggttgcagcatttccttaacttcaaatacttgcggtgcccaaaattctgcaccaaccatctgtccattgactgccagctctgccatttcttctgcctccagagaaattcttatttcatcatgtaacaaatctttctccgacacatccaatactgcatggtaaattttttgtacgttatcttcatcttcccgaacctgtataaattgaggctgtatttgaagaatgtctgatgcaggctctggtaaaagttcatattcttctttcgaacacacaaacaataacatatttcctctcacaggaatttttaatcgaaagcttcggccattcttttctttttctgtttctaacttttccgattttcccgtccatagatcataagccccaattaatttttctgtaggaaggatcacttccgcctccagcggtttgtttgcttcattcaccaaaaaccaacattctattcccagtttttcaaaatgaataaccctcaactctggcagcggtggtacacaaacacaatcccgaactgccttaccgattcccatgtctttcgcctctggaaattccgaaatatctccaatcactgtctgataatgatgttcttgacagcaaaatcctttttcatccatcctgcagtctttccacacactctctggaatgtactgaaatccaatctgattttcaaaaagcagcctgacttcctcatgttttaaatctcgattgcggcataaaactgctgttgaagcataaaccttgcaatccgtcatcatgaacgagagacgtttcatatacgttgcccatttttcataatatctccaccatatactatgcggtcccacatccggcggacgctcatcctttctcctgccctcaatactgtagtaatatgcgtgtggaataaacatatttactcctctgactgccagccaatccaaataccatttcacatccccaccggaaagctgccatggattgtcatttttgttgcacgcaccaaagcattcattcgaattccgccgacgtcccatcaatcttgctgcatccgcactacattttcccattgtagagtccatccccgttactccaccggtttcaggtgcaatccagcgaagtacaagatcttgcccaggtatatgaaaatatttctgcacttcaatatcatcgctctgatgtgggtgtcccatcaatgcaattttgtgttcctcacaccactttgaaagtcttccataataattccgggactctttctccaaaatcatccgttcatacagtcttgtatcctcatttttttctcccgaaaacattgccgcaagattttttaatgtccccccggcttcggtaaattcctctgcaaaatgatgcgtccacggcaaaagtccctgctccgaatttcttccaagaatactcggctcatctgtgaaaaaaccaaggattgtattctcaaaatacggtttcaactgttcataatatgcctcatgcgtcaaagaaataaatcgttccactgcatccgggttcagaatatctgcacttgccggagcaaaaggctcattatcatcctccccccagtggattccacgcaatgttccgccacttttacgaacaaccaacacagcatcctccaattgtgcgagaatttcatctcccggctgttgggttttcacaagaccaattccttcactggcaaactccggatgtccttctactacttttccacatgcagaacctgatggatacatgccttcatcatataatacgaccttcattcctaattccgccgctttttttactatgacacgaatataataaaaaaaggattcctccaggtattgaattcttttcggcagtcccattctcggatgcagcaccactccataaaccccgtgtgctgcaaaatcttctaactgacgctgtaattctttctcatccaaatttccatttaaaaaccagaatggaatcggtgtatattcatttgacggaacgttaagctgttgtaataacttcatcactttttacactcctcctcaatccttttactctcaatagaacttgcttctaatataataggagaccgtttactgtcggcctcccattttaatatcgtttatttgctcactacattttcgtcgtaagttttctttaactctgtcattttatttgcccagttatccagataatcctgcgcggattcgttgccaagaagtacattctgaaaatcttttgccagagtattcgtatgcagatcaaagtatcctgtcacttctaccggcagcgtagcaatctttgtttcagggttgagaagcatttctgctgtggccttaactggtgcagattcctctacccacttatcttccagtgcttctttatttgtaggaattgaaccaagggtttcattaaagtagctgtttgcagtatgatctgtcagatactgaatgaatttatatgcttcttccggatgtttagaattcttaaatacagaaagagacgcaacaccgttagaaaccatcacatctgtatcatccacagatttcaaatttacaattgccccaaaattctcttccccaagtgtatctctatgctgaccataagatccaatgttatggaatatcattgctgcagaacctgaatcaaacgctgagatcatttccgtacttgcatttgtaatatcactttccggggtatatttgttataaagtgctgcgaatttttcaagaaattctacatgctcaggcgcattgatcgtagagtttccatcttcatcaaacatatctgtaattccagagtattgatacaacatttgttctaattgctgagaacttccagctccgccacgaatagaaaatccataaacaccatcctctttctctgtcagtgctgaaacatcatcaaatacctcatcccaggtttcaggtacttttatgttcttttcctcaaacatctgtgtattataccataatgctggcggtactacgtaaaatggaagactgtagtatttcccgtctggagctgttgacttcatactatctacaaatgtatcaagcaatgaatcatctccttccgcatagtcatctaatggaagtaatgcatcttgtatgataaaatcattcatccaatattgatagatgacaccacagtccggagttgtatttccctgaattgctacatcatattttgattttgcctgatcagatggcaatggaacatattttactttgatatttggattttctttttcaaaatcactgataattttttcatatacttctgtgtgaatggtatccgcataattgtcccaaaatgtgagttcaacggtttcatcccccgtctttgactcactttttgtctcttcagatgaactgtttccacagccagccaacatacccattccgattacacctgccatcaaaactgctaatactctctttttcatagctttccctccacttgaaacatattgatttataatttgtcataccacgcaccgtgggattaaccttttactgcaccagaactcataccggtcacaagatatttctgtaagtaagcaaatagaatgactggaattgccattgcaatgattgctcctgctgccatcgcaccataatgaataccatactcaccctgcatcatcttcaacccgattggtactgtatattttgccggatcatttaagaacatcattgcaaataaaaactcattccaacagccaatcaatgcaaacgctgctaccgtaataattccaggtacaagcatcggaactaccactttaaatactcctttgatccgactacatccatcgatcattgccgcttcttccaaagcatatggtactccttccacaaaccctctcatcaaaacacagcaaaacggggtctgaaaagtgacatttacgagaaccagggcaatatgacttccaacaagtcctaatccattaaatatattaaacaatggaactagcaatactgctgccggaataaactgcactgcaagcaataatcctaaaaatgccattttaaatttaaatttgtaacggctcaatgcatatccaaccatcacagaaatgatcacaataaaaataacggaaataccacttacctttaagctattaaaaaagtatttgtcaaaacctacatttgtccatgcatctacaaaatttgcgattgttccattcttcggaagatacgttactgtcttgcccaggatttctgattcgcttttaaatgcagtattgattgcccagtagattggaaacactacatatacacagattaaaagtaatggtaaccatctcaaaaatataacgtccctttttttctccttcatttatgactcactccctttcgcaaatccagatgctttcatataaataactgcaataattgtcagtatcaggaagctgactacagaaatagcagaaccatatccataattgtttgttgtcaatgcctgatttgcaatcaacatactcaacgttgttgtctttccaaccggtcccccattggtcaagctaaagatcaagtcaacactgttaaattcccaaatcgttcgaagcaatgtcgtcaaaacaattgtatccttcaaaagaggcaatgttacacaccgaaacgtattccacttatttgccccgtcaaccttcgcggcttcatatacatcctgtggcaagccctgcattgcagccaaaagactaatcgcaaaaaatgggattcctctccaaagctctgccacaatcactgcaccgagcacgagatgtggatttgccaaccatgcaactggctgatcaatcaatccgattttagaaagaatatcattcaataccccataattttgattataaatcagactaaataacactgctgtcagaacgcctgacattgcccatggtacaaaaaccaacgcacggaaaaaaccacggcctttaaaattttgatttaaaataagtgcaacgatcattccaaagatcaattgcagcaataccagtgcaacaacccacttcaaagacacaaacaatgccgaataaaactcgctcgttgtaaaaatcttcttgaaattatcaagcccagcgaaaccatttgcaaatggcattgccggattataattctgaaatgccagataaaatgtcttgcacagaggataaagcatcacaccaaaaatcaaaatcactgccggcataatcaataaatacggtgtccatatcaccttctgttttaccccggcaacatttttttgccgcctcttactcatttttctcaccatacctttctgaatttccttaacttgctattattaaaccatgcttttaccttttcgtacattcaataagtttagtgatttgttataaaatctttacactttttatcctcggggaaccttttccatccataaaaaagtaccccggctcttactgccagggtactttctctaatgatttctttctcgatactgcgtaaccgtacaattataatattttttaaaactcatactaaaatattgcggatttttatatcctgttgcttccgcaatttcataatttttcaactcgctgtttaaaatcaatcgacttgcattttccattcggacgcgaatgatataatcatagagattaatatcaaattttttcttaaatatgctggtcagataacagtgattcacattaaaataatctgcaatttttactaaggacagctcacagtccgaataattttgctcgatatagtgccttacttcaaaaagcaaatgctccacatctgagttaattttctgcaaagcactctgataggaagaatacaggtcattcaaagaatgcatcaaacttccataaataaactcagcactccctcccccaagtttttccttcacaaaatcatgtatcatattttccaattccgtcaaattttcataaaacaaaagttcatcctttgtcgtactatccgtataaatagtaaaaatttgaaggttatccatacaaaagaaaatacttccatgataaatattttccaatgaatcacataatttttctacccactcttttttctgttccagtgaaattttttcacaaaactttaattcgataaatgaaacaatgccaagacctttattgatgtttatatcaaattcttcaaaaaaagccgtatccaaattctggaagttttcccgcatcagtttcgacatatactttcttttaagctgcggatatttttcttttaaaatttcctccgtctttttgtctttgttataaagttcttctgccttttggatcacccgaatcagctgttcctgttccaacggctttgtcagataatctaccgcattcaacttcaaaacctgctgtgcatactcaaaatctttatatcccgaaataaatacaaatttaattcccggataataatccatagcgattgatgccatctcaattccactgattcccggcatttttatatcggtaagtataatatccggctgatgatcttttaggtaatccaatgcttccattggatctcttgctgtataaaccagctcccatccatgacttgcccaatcgattttgttctcaatgtttcttcgaatgattgcatcatcatctacaaacataatttttgtcatttatgtacctcctcgtacggaagaatcagaattactttggttccacaatctacttctgtctctacatgaattttatattctttcccataagcaatctgaattcgatcctgtacatttttcaacccatatacattgtaagactctcttgaataatcacaaataggttcgtctaatgatctctgtatcttttccaaaacatcttctgcaattcctccgccatcatcacttactatgattctgatatgatcttggcatttttctgccaaaactcgaattgtaccatccactctatatggacgtatcccatgatacaatgcattttccacaatcggctgcaagatcattcgaagtactacggccttcttcaattcgtcggccacgcaaatttcaaactgaaaatcttcaaaccgtgtctgcaaaatagaaagatatgccgatacgtgtttcatttcctcctctaatgaaataaaagatttccctttgctcacaccgattcgataaaaaactaccaattgattgatcatttcacccgctttttcagtttcattacaaaggcaaagctctttgatgcagtccaacgtattatacaaaaaatgaggattaatctgtgcaaataaatactgcagctgcgttgcttgttttgcttgcatttcacggtggatagattctgtcagcgctgcgattctatccatcatttcattcacgccatctccaatttcactaacttccaaatacccgttcacttcaattttctgatattcttctggcttttttattttttccatctgctttagcaaattcataattggttcagaaaaataacgtggtattccaaaatataagaggataaatataataaccgcagccgcaataaagaaaatcagaacatactgatacgtgttaaactctacataaagttcatttttaggaattacggttaaaattccgacatctcccaaaacaagtggcgaatacactacatataaatcttcaagatcaaactctgcaatatccgtctcttccatatgccggattctattttctatttttgcgaaatcttttccacttaaattattgcttgatttttgtgtttcattattttcaagaacacacatttctttttcttgaaacaaattcatctcgctgctaatcgtcactttacttcctgctatcgtattcaaatagatagcgtccctgattccaatccagagacaaccatgtgtcaaactttcttctgaaccaagcggataaaccaaagctaaattataaggaatatccttgctgatatgatccggcaaaacatctgatacgattacccacatccaatcgctctcatttttcttcagtttttcataattcagattgcgcataatatctctctctgatccagtatttgaatgaatataataaatcgaattatccgaaagatacaagccaaccgtatcaatatatgctgaatagtgctgcaaaaaagaattaaaattagatgtcatctggagataatctaacggttcaatcggtgattttccatcatcaatgttattttccatcgtataaaatgccctctgactcacaattcctttcgcatgatcttgtatttctatcaagtcctgattcaacgaattgcggcattgctccaccaccgcttttgcattcttttttacaagctctgtatattgccttgtacctgagctataaaatactacacagcaaatcagcaaaagcagaaaaaagggaaataataaaattgtaaggacttttcttattggcattttttccaatttagaatatattttctttttcattgttctctcttgacacctttcacccggcaaatacgttttgtaagttcttacatcattacttttagtatagttaagtttcttttaaattgcaatcatgttcacttgggaaagcatagtcttcacattttcatacaatagtactctctcttcattttattgcaataaaaatctgcttccagacattttcatgcccaaaagcagattttaacattataatttttatctatccatcccacatgcactggctttttcaaccagacaacgatctttcatgactgcttcgtaaaaccgaaagccaccggaaaaattataggcatcataaccatttcctgctaaaattctggcagcaacatagctgcgaagcccgctctggcaaatgacgtacactggttttctcttctcaatctcatccagatgttcacgcaaggcgtctaccggaatattccgaaatccttccaaatgacctcctgcatattccccttctgtccggacatccaacagtgtcacacttccatctcgcggaagtttttcgatatcttccaaaaaccactgcttcaaatatcctttttctatattgtcgatcatataccctgccatattaaccggatctttggctgaagaatatggaggtgcatatgccagatccagttctttgagatctgtcgccttcatccccgcatgtatggccgttgccagcacatcaattcgtttgtctaccccctcataccccacgatctgagctcccagcaaacgattggtctctttttcaaaaagtaccttcattgtcatgacttttccacccggataataaccggcatggctcataggagaaagaatgactttatctgtatcgatccccagtttttttgctctcttctcatttaaaccagttgttgcagctgtcatatcaaacactttgatcacagaacttccctgagctcccgaataagaactgtttccaccacaaatattgtcagcggcaatgcgtccctgtttgttcgcagggcctgccagagaaatcagatcctcttcacccgatactgcatttttaatctgcacggcatctccaactgcataaatatctggaatggatgtctccatacgttcattgacaacaatacttcctttgattcccagtttgattcctgcctctcctgccagttttgcatccggcgcaacgccaattgccagtattcccatatctgcatggatcggattttctccttttaaaaggacatcaatgccgccttctttttccacgaatccttccaccgtatgaccaagtgcgagtgtcacgccgtgtctcctcatttcactatgaataaaagatgccatatctggatcaaatggattcatcagttgttttgctctttgaacaatcgtaacttccatcccggactctcgaagattctccgctaactccagcccgatgaatcctccgcctgcaagcaccactgattttggctgatgagtttctatatatgctttgattcgcatcgtatcttccactgtacgcagtgtaaacaaattttccattcccaccccggggatctccggctgtaccggtcttgctcccggtgaaagaagtaatttatcgtaatgttcttcaaactcttcccctgtctccagatttctgaccgaaaccgtcttacgctccggatgaatggaaagcacttcatgacgtaccttcatgtctacatggaatcgtgagaaaaagctctccggtgtctgtaatgtcaattcttcggaatctgtgatcacatcgccgatatagtatggaagcccgcagtttgcataggaaatatacccggaacgttcaaatacaactacttctgcttcttcatttaatctccggatcctggctgccgccgttgctccgcctgctactcctcctacaattacaaccttcatttaacgttccacctttcctgtatatgaggcaatcccgcctatattttttacattctcatatcccatcttctgcagagcgccaactgcctgacgacttcttgcaccactgtggcaatatacaaaaacaggactgtttttactctttacaacggaaagagccttctcaatgctttgtaatggaacatttttacttttggggatgtgtccttccctatactcctgaggcatacgcacatccaataaaactgctcctggtattgctttatattcctgtactccctgattaatatccggggttttaaaaaaatcgaaaaaggctttctgaatatcgatcactgacatatcgttttcctcctctatctctgtttgatgaatataaagtaacgcatttatgaaaatttttccgtgataatatcacaaagttgaaactttttggtaaaattttttatctaatgagtatcaatcggttgaatgaaatgaagatataggaaacggaagttcatgcatgcgaagagaatcaggagaggaggtgtgccgatgagtcagttagtcagaaaggcacaacgcggagataagaacgcatttataacgctgatggaagaacaaaaacagatcatgtataaagtggctgttggtattcttcgaaatgatacggatgcggctgatgcgatgcaggatactgttttgagttgttatgaaaatttgcagaatttaagagaaccaaaatattttcaaacatggatgacaagaatcctaatcaatcactgcaatcggataatggcagaacgtaaaaaagtggttccaatggaaacatatcgtgaaggagaaaaaacacagaatgtgcaggagtctacaggagaactgcttacgatcaatgaagagtttcttgaaatgctgaagcaattagaagaaaaatatcgaattgtattgttgctgtattatgtagaagaatttagtatcaaagaaattagcagcattttaaagatcaatgaaaatacgattaaaacgaggctggcaagaggtcgaggtcatttcaagaaaatatatatgaaagaacatacggaaatgaattaccggataagtgaaatataagaacctgtgaaagaagcaaaatggatggaaagtgagggatagcagatgacagagaaacaaattcgaacctcggaaattgagatggaggaaacgataaaaaagaatcttcaagatcagattgaagttccagtgaatgtagaagataagatgcaggatgcctatcgtcaaatttatcaaggagctgtgaaaatgaaaccggccgccaaaaaacgacttcctgtgtgggcgaaagcggcagtggctgcagtttgtgtagtttttgcagggagtgccgtactggtaagcaatcctgcattggcaaaagatttaccgttaattggcaatatttttgacgaaatgataaaggcaagggatgctgatccttatggagcgaaagatacaactgcatatcagaatatcaaagaaaatgcgcaacagatcctaacagaacaaatggcagccgttgatcagggaataaaactggaagttacagatgcatactgtgatggctacgatctgtatttcacattgggagcacaagatgaagacggtgcgcttgaagctgcagacggaatccagttcttcaaaaatcaaagccttttggaagttataaaaattgatggagcttatattggctccaatgtgaatatgaaatatatcggagacggaacttatgcaggaatcttgaatatcaataaagcgtccctgccagcaaaaacctttgcagaaaaattctttgtagaactgaatattgacaggatagaaagcagacattatggtgactcctccaaggccccaaaggcaattgcaggcgaatggaatctaagctttgaagtgacaaaagatgaaagtaaaaatcaagtgtttgatctgcagaccgaagaccagggctttgctgtggagaaaattgtacaaactccgagtaatctgcatcttgatttcataattccaaaggagtggacagaacaaaatccagatatccaggtcattgatgaacaaggcaattccgtacaaaaatggaacgctatttcagaaaagagagcagatggaagcgaactgagagaatattccctggaatattccggatcgagaaattatatcatacgagtagtggataaaaataacagcagccaggatgaattgtcaattattgcagaaattccaattacattgtaatcgtctttacatgacatacaattttataactgttatataacaaaggcgaaaagctgattttactcaagcttttcgcctatcattatcacgaaacatcgatttgcatccggccaaattattcacatttcccatatttccgggcagctttcatcaatgctgccatattttccggccttgtatttgcgcccagggcacaacctgaactcaaaatcgttccgtatcctttcgttctttttataatatgctctacctgagcctgaacgtccagaggtgtcccaatgcacatcggatcactcggattgatatttctcatcagtacaacatcatccggaactgctgccctcgcatcccccatatccgtctgccagtcaatctccagaattttcgcacctgtttttcccatatcggatatgatcgctcgtgtatctccacaaatatgtacagaatacggcattcctgctgcacgcattgtttctgctgctttcttctcataagggaacgcaaatgtacgatacatcgcgctggaaatcagattcggactcgcataagcgtctcccatactcgttgcatgtgccccggcctgtatttgtgctttcgcgaaacgtatgtgagcttctgtcgtccattccaatgcatgctgaatcacctcttcctcttctgtcagaagatccatcataaattcctgcgttcctcgaagcagacaaagcagactaaatggcccctggtcagcacgccccataataaacacatgatctccgatcgaatctgacaaacgctccactgtctccagccattcacaaatccgtccatccttttccggatctggaagatttaaataatcaatctcactcagattttttaaaaccggtacatgctcatcgactgatgcgacatccctttcccggaatacaacttttgcaccacatgcttctgccaatgtggcatcatcaacatccacaacacacccatcgtattgatatcgttcctggcaaatacgatggctctctgccatttttgccggatttctattgatttctccgatttcataccctgcagttttggcactaaacagaaatccctgcggaactacaggaatataatctggagttttcccggttaatactgcccggactctttctaatgatgtcaattctttcattttattccatctcccttcagacactttgacttattgtttcgctgattatataatgtttctaaatgggcttcaatacaatatcattcgccgtacaaaatttacatttacaacaattcaaagagggagataaatatggatcaggcaattaattggaaagatgattatatgaacacaaaatatcggaaagtccttacaaagaaatatttgaatgttcccgggcttcaattgttcggaaaacagatccgtacttctgccactgaatctcttcccccacattttcatgaaaactgttacgaaatcgtgtatatcaccagtggaaatcccaatttttttgttcaggaaaaaaattactatttaagcggtggagatgtatttattacaaaacctgaccagattcacagtacaaattccgttccggtcacgctgtcagaaatgtactggatacaaatagagatcaatcctgattcttcctttttatttttaagtcaagatgccatcattactttacaaaacaaattatcttctcttacctgtcccaaaatcaccactgacggagactgggtcaaaatgctgttttccaaatcatttcaggcagcatcctccggggagaatcctcagcttatcagccaatatctgagtcttctgctttacatgatcctggatttttctgaaaagacaacatttaagctgacccccgatattggaaaagctgtcaattatattttagatcatattgaagaaccactttcttttgatgatcttgcaaaaatttcagctctgtcagtctcacagtttaaacagaaattcaaaaaacaaatggggattgcgccaagacaatttatcaatctccagaaaatagaatattcaaaagaccttttgcaggaaggatattccatccggcaaatttcagaaatgctgaattttgtcagcaacagttattttacaaccgtttttaagaaatttaattcctgtactcccagcgaatatctgcggcactaccacgctggccaccccatcctgtaaagtacaataatacaatcatcgccatcaaaagagggcatcgctccatcatctaatcagatgattttgcgacaccctcttaatctcgatatagacattaaattatgatttctaactttaaattgcaaaccctgcatactgtgtcatatataattcataatatcttccctttcgttcgaataactctgtatggctgccactctctacaatttctccatgatccatgacaacaatcaaatctgaatcccggatcgtcgataaacgatgtgcgattacaatactggttcgattttccattacacgctgcatagcatcctgtattgctttctccgtccttgtatctacatttgcagttgcctcatccagaattaaaatcttcggatcagctacaaaggcacgagcaattgcaagaagctgacgctgtccctgactgatgttttctcctgcacctgttaaaactgtatcaaatccctgaggcagcttctcaataatatcctcacagcgactcatttctaccgctgtttccaattgtacatctgtggcattttcattgccatacgttaagttatggcgaatagtatcagaaaacagcaccgtatcctgcaaaacaattgcaatttcttttctgagatcatcccttgagacctctttgatattctgattgttaatgcggatttctccactgtcaatatcataaaaacgcatcagcagattcacaattgttgtctttccgcttcctgttgcgccaaccagagctacttttttcccggacggaactgttaaagtaaaattacggataaccggataaccgggcgtatatgagaattgtacattttgaaaactgacagcagcattttcttttttagtaagttccaaacctcttttatcctcatcctcttcatcctgtacttcaaacacccgctccgctccggcaagcgcagtctgtaattgaccgtatatctgagcaatttcattgatagggcggctaaactgtctcgcatagacaataaaagccgaaatcacacctacggaaatcattccatggatggaaaaatatcctccaaacgctgcaatcaccacaaatccaacattaccaatacaattcataaccggacccattactccactgaaaatatccgtcttaattcccgctttcgtaagtgaatccgctgttcggcaaaaatcttctgttgtgatatcctgatgattatatgccaccaccgtatgatatccggaaatcatttcttccaccgtaccatttaactgtcccagaagcatctgcctgttccgtgaaaatttgcgaacctttccggaaagaaactttgttgccagaacagtcaaaaaaactgttacacaacttaaaagagccaattgccagcaataccacaacatcattgccgccgtaccaacaatcgtcagaactccggaaaaaagagagggcaaagactgggaagccgttgtggaaatattctcaatatcatttgtcatccggctcatcacatccccatgggaatgggtatccagatacccaaccggcaaatcaatcattttcccaaacaattcttcccgcatccgccgtacaatacgctggcttaattttgcactgagtaaattctggaacaactgtcccccgctatacagcaaatatacaaaaagcatacaccctactgtgcgcaaaagatttccggctttcattcctgcaataatatcaatcgcattactctgcaaactgggagcataaacgccacagattgttccgaaaatgactgcgcagagcatacacactacaattactttctcatgtgcaaagtatgtaatcatccgtttcaggaccgctcctgtatgttttgcatgctgcacttctccaaatcgttcatgacggtttgaaccgggaatattttgctgcggcagtttttgttcattacgcacactcatggtttttatcctcctctcccatctgagaatagtaaatatcctgataagccttgcaggatttcaacaatttctcatgagaatcacagcctgcaatccgtccattttccaaaacaataatccgatctgccctgcgcacagaggcaatcctctgggcaacaataattttagtactttcaggacttatttcttgcaatgcattataaaaatcagcctctgttttcaaatcaagagcgctggtagaatcgtcaaaaatcaatatttccgcctgcttcacaatcgctctcgcaatggaaaccctctgtttttgtcctcctgacaggctcatacccctttctgcaacaaccgtatgatacccttttggtgacgcattgataaagtcatttgcctgtgctaccgttgctgcttccctgattgattccaattttgcatccggttttccccaagcaatattttcacagattgttgtattaaaaagttcacttttttgcaatactaccgatattttttcccgcaatactttctgtttgtattcccgcacatctattccatccacataaacagaacctgctgttgcagcataaaaacggggaatcagatttacaagtgatgtcttcccacatcctgttgtccccatcactgcaagagtttctcccggatgcactgtaatactgatatgttcaagcacactctggtcagtacccggatatgcgaaagacacatctcgaaattctatttctccatgcttatcagttttaccatcccactttccgtccataagctgcggttcgctgtacaggatttctttaagccttttccacgaagcaagccctctggaaatattctgaaacagcatagtaagcataagaattccgtttaaaagctgtgttgtataagtaatcgccgccatgataacccccggcgtcaccttaccacttcccacttcaaaagaaccagtcagcaaaattacagcaacgaccaaatacatcagtgcgttaaccaccggattcataaaagcaaatagcacaagtacccgaagctgagtccggatcagttcatcgtttgcctttccaaaccgcactttctcataaatttcccttacacatgctttaatgacacggatacctggcacatcctcctgcataatctcgttaatagcatcaagctgtgcctgtagtctgacaaaaagaggacctgctttcaccatacagaaaatcagacaacccacaatcagcggaaatgcgcacattactataaatccaaaatcccgattcagtcggaacatacaatacatactgccaaacatcaacattgcagtacgaatcattccccgcacaaataaagaaacaaaggtctgtacctgagtaatatcatttgtcactcttgtaattaaagaacctgttccaaatttgtccaactgcggaaaagaaaaagtcataatcctctgaaagcagtctttacgaatctcattgccaatattctggctggaaatatgaacgaacgcattattaagagaaccacacagacctccaaatagcacaagtccaatcatccatattcccaatttccagataagagacagacttcctgttcccccgttatttaatcccaatacgccctcatctacgattctgctcataatttcaggttgaaccagatccatcgacacctcgccaaccataaaaagagctgccaaatctgcatatagcagatatcgtttcacatagttccacatcgcttattctcctttattatgggaagctttctcatgatgtccatggtttttatgatgatgttcatggttccttgcaaggtcctcgcttccttgatagcgtacattccaatcttcgtttaccttttccaataacatcagcaactcatttttttcatcctgggacaaacacgaaaacatttcttcatgcctctttctcctttgcgtacttgcctcttctgccgcaatctttcctgattctgtaagagcaatatccactgtcctccgatctgttttattcggcgtacggctgatataccccatgctttccagttttgcaatcacttcactaacagaacccggacgtattcccagacgttccgtaagctgctgctgtgtaacacagcctccaatatcctccaaaacgatcaaaatccgcttttgactgccctttccctcatacaaaaaacgcattgtatgactcagatcccttaaattaagtaccagcttctcattattagatgctgaattataatgctccttgtgccatgcatcatgattttcatattctttgttttttctcatatgttaatcctccttccataattgctaaggtaccttaatattatattcttctccccataaaacatcaaggtaccttatcattttctatttttgtcccactgatatctcctcaaaacaggcgtggatatttcttttttatagaaacattcacgcctgttttcatttacttatattgtttagttcagatattctccaaccggagatgtattatactgtttcttgatttcaatggtaattgatccatcttcattcgtttcttctgatatcagcctgtactttgtaccgctcttttcaagctgagctttatatttttcgtattcctgcacaattgctttctttgcatattctgatctttctccgtcacgactggaaaaacacaatgtctgagtgatacaagctgctttaattcttttcattataaatacctctctttcattttacagatacattacataaattaaaaacagggacccttcactcagtaaatttgaatgaaatgatccctgattttcatgtaaattgtacttggttttacaatatatattatactttatttttttcaaaaatgtaagtatttttactctgcacactccataattattttctcacacttagcatatccaagctgtgaactgttcagacacaacgtataattgcttgcctttccccacttttgatctgtataaaaattataatttgtcatacgccttttatcagtatctgccatcattctctttgcttcctgttcacttaccttatacaatttagtgatcctttttgttttttccggcacatcgccatgtataaaaacattaagcacatcatttctgtctttcagaataaaatctgcatttcttccgataatcacacaaggctttttatctgctatttctaaaataacttttctctgtgcctgatacacaatatcttctatggattttcctgtaatatcacgtcccgccagagcatatccaaacattcccttcttaggtgacagttctgcactttcctgaatatactccggtgacaacccggattcctctgcaatctgattgataatatttttgtcataataggaaatcccaagtttctttgccacttcttctccaataaaacgtccgccacttccaaactctctgctgattgtaataattcttttcgacatcactgcttcctcctactttaaaatgttcactttattttttctgattctctttaagaacaaatatccaattatacatgccagcatctccgtaattggaaatgcccaccagatcagcgaaacactcatctgaccatttctgacaaaaacagaaaagattcctgctagtggcaatataaaaacaagctgtctcagcagggaaataatcaatgattccatgcctccatccaaagcctgataacccccctgataagctacatttattcccgcaaatataaagctgagtgaaatcactctcatcgcaccgataaaatattcccgtgactgtccggcattaaacaaggttgcaaacgctccgggaaacagttccgtaattgctgtgcctacaatcataagtataagtgtatagaaaagaccatactttattccatcctggattctctttctgctacgcattccataagcaaatgcaatgatcggtgtgatcgcatctctcaaaccaaaagcaagaaacagaacgaattgctgtactttataaaacagaccatatgctgtctgagcagatggactaaatttcaggatcaaattcattacatacaccataatggacattaaagcttgcgcaatgatcgccggaagtccaatcgcataaatttcttttataattcctgcatttggcttcatatactttattccatgttcaaattccttatttagtttcatatgaaaaatcaacaatattactgctgacgcgatctgaccgatcactgtggcataagccgcaccttttacacccatttccggaaccggaccgattccataaatcattattggatcaagaataatatttataactgctcccactacctgtccaatggtggaataaagtgatcgtcctgttgcctgtaataacttttcaagcaaagaaaaaaatatgattccaaaagaaaacacacagcatatttttagataactgatccccattgtaagcacttctgtatccagtgtctgtgacgaaatataaacttttaccccaaagactccaaacagaagacaaacggcataaatgatcacacccagaaaaaaactgtttcccgcaacttttgcagccttttcacggtttccctgccccagtgtcctggcaagaagtgcattggttccaacacctgtaccaattcccactgccaccataagcatctggacaggaaataccagagtaagcgcatttaatgctgcttcacttcccactctcatattcccgacaaaggcactatctacaatattgtaaactgcctgcagcgccatagataagatcatcggaattcccatctgaatcatcagcttatttaccggcatatccttcatcttgttactcttttccatcttgttatgatcctcctttttctgcatctgccgaacctttcactggcaggctcttacgaatgctttgcaacaaaaaagtgtagacttaccatataagctggacttacgctgataagctacacacttttacttgcaaatataatttaaaaaataaaaaacgagtaaacaaaactggatttacgcagatttgctactcgttctttcgtaattatatttcctgttttaaaaaaagtcaaacaatttttttctgccttcggatcttatttcaagatcatcatcagaacccatcacctgtccatcctcaaaaaacactaaatatatcattacaactctgtacccgtattatcaaaaaaacttctcgacctttatattcgcttttaataatttcaaatagatcttccgggctttctttgcaaccatttttcagccatagttttatagtttgcgtaatacccgctttaaaaaattccatatgatacgcgacaaatttattttgaaaatgtaccctcgcaaggtcagtatcataggcaataattttgtattggttatcatatccgagtttgaaataggtctgatagaaaatttgattctcttttatatggcgaaatagcttcagatagtcatggctgttaaaaccatgtgtaacttcttctttgtataaatcagataccgcaacttcaagcttatcccgtattgtgtccgccaacccgtaaatatctgtataattcgcataaaatgtagttctgtttaatccggcacgtttacaaatatctgacacgctaatttcatttaactctttcatttgaagcagttcaataaaaaccttttcaatccgctccatagattctctttttctcttattattaggtgtattcataatagctgctgctcctttatcccaacacttgtttgtaaattgatgattgtttttcacttacaggttcattatacttgatttacaagaaaacaacaactattgttttaataatttggaggtgaataatcaatgaaaaaaagtagttttgttaccttggtgttaggaacagtcagtatcgttcttttttctcttggcgtatgtatggcgcttatcccggagtggaacgcatttagaccgggagttattttcggctgtatcggtttactttttggttttatcacgctgtatatccggagaaaaatgaaacataaagagcccattcatataaccggaaaagctgttatgactgtcattgttggtgttgtcggcgctttggcgttgggtgtaggaatgtgcttcagcatggtctggggaaaaatgattttaggcattgtaatcggcctgcttggaattgttgttctactctgcctgattccattgacaaaaggtattaaaaattgaaattgaagcagaatgccacatcgctgatcagtcggacgaaaacaggtaaaaaaattatagaaagtcagcactatcgtatcattctttctgctttggttgcctttgcattcaatctgctatacgccttatatcatggcttactcggttttttgaaccattccctgtggtttatttccatgtgtgcttattatggaatattagccacaatgcggttttctgcggtattatttgaacgcagttatcataaagccccctctgttaatacagaacagtttgtgatgaaatttttcagtgtactgttgggcatattgggagttgtacttgcagtagtcaattatatcagtctgacgcagaatattgccacaaaatatgaagaaatcatgatgataacgattgcaacttacactttttataaaatcaccatgacaatcgtaaaagcaatcaaacagcacaaaaatacctctctgttactaaaaaccatacgaaacatcagttatgcggaagtatctgcttccatattgactttacagcgatctatgcttatttcatttgattctatggacaataagcaggttttcctgatgaacgcaatgacaggagctgttgtatgtctgtttgtactgatacttagtttatctatgataataaaaacaaaaagaaaggaacttaaataatggcaaaatctaaacttgtaaaaacaaatgagaaaatagcagaaaaggttatcggaacctatcaaaaaattgaagatacagttgtgggcggttataataaaattgaggatgcttttgttgaccgctatttgaccaaagacggagaaaccgttgaagaagcaaaaaaaagattaaaacaggaaaatgcagaataagcagcaaaaaatctctcccgggggaaatatcgaagcagtgccaggatttattctgtacgctacttcaatatttttgcaaaaaacgagggagcatcgctccatgttgtaaaaaatccagccagaatcttcctgcttggggattttgtctggatttttggcatactttaataaaggcctttgccttttctttgttttatgcagtttcttttatctcgaacaggtgcgtccctgtccgctctttctgtatttttgagtgtagcttattaagattatagcccatgcacagcaaaagaatctccagtttcactttgtttttccatttctcataggtctggggtttgatataaggcttttgttcctgttcccgtaaataggtatatccttcttcactttcatatccagaatccgtattcacacttggatatcggaaacccagttttttctccattccttttaaaaacggaaccagtgtccatacatcattccaatcctgaaaaatatccgttgccacaagatattcgctgtccactgcaatctgtacattatatcccggtttcagctgggcgtttcgcatatgatcatccttcatatgcataaacgtagcatccggatctgtcttgcaataattattccgtccctggaagctggctgtatgccagtcatagatagtttggcgttccaggaaacggcagatctcctgaagattctgtatccttgtatcttctgtcacgtaaaacctttgcatatactcctgattcagaagcaatacggcttcctgtattttgcggaacatttttgttttccattttcccactgattttttccagacaaaagtatatttgttcgcgcatgcttccagttttgtgccatcgataaaaacagtctcctttcacaattcaccggctttttccagccgttttatcatctgataaaagagatcttcacaggcatccgccaggaatcccgtacggaagcgtgcaatcgtgctgtgatccggtgctttttgtccggcaagcagccacataaagttgatatcacgtttgcatgctgtttcaatttttctggatgaataagtattctgggaatacgcataggtcagaatcttgaacatggtcttaaggtccactgccggatttctgcctttggcagagtaagcctgatacagaaagctataatccaattcctccaattcgtggctcagcagtcggacagaatcgtcatcaggaaccagaccttccaaatttaatggcaaaaccagttgataaggctcgccaaattcagtataatttttatggtattttatgtattttgtcatacttaattataccatggattgcggactcttcggagtccgttttctacttttaggcataaaaagggagctattgctccatagatgtttactcatctattttgcaacagcccctagttctacgaacattgctccaaaatataatccatcccatcatccaacttcagaactttcgcattctttgacagcatcttaattattatatcaagatttctcatatcttcataatccgaatcatatataaataatactttcttctgattgcccaactcgtcagctatgaaagaccattgtctagcacttccaattactctctttaaattttttcctttaaatgagaacatcttaatgcatacatttccaacttgatagtcaaaagaaatttcatcgctatatggtccagctaccttttgagtagtatattcaagattgtttgactcaagcactctacggatcaatttcttttcttcattactatttaatctctgcgattttgccaaatcatatttcaaatatatttttgataaattctcaacataattttcgttttctttcacagaaatcttcttaacggatgaaaatctaaattcattcgcatacactcgaatgtatgaagtcaaatcaaattctttattaaaattaaaaacagaagtctcaacttcatctttaattcctcgtaagtagagcttaacaaaatctatatccgcctcatcatcaaaagcatgaaagcgctggaaattggaaatatatttgaaatcacgttgtcctgttgtcacattgtgaaataatacacctatacacaagcactcatctgatataggcgaatgataataattcaatgctgcatattcaatgatgtacataatatttcccccttcctatctattattgtatgttaaaatcgtggatattatcactgccaaattatcaactctatataaaatatagtttataagttcagcaatatctttctgtttaggtttccattcttccggaataatgtcgataagttctattattgtaccacgattaatcttatttttaaatactaaactttctttttccaacatctcttttgtaacagaaaaattacgaaaaaacatctcatacaagtacgaattatattccaataccttcgtatctaataaatcattttcttccattgctctttttaagcaacttgaatcccaaaatgtttgattgataaatacatgtgtatgatctattacttttagagaaatatcatccttacaaaattttaccaataagttaccaggatttctatctgtattaaatataatatgatcaaacaaaagaatctttacaaaatcctctttgtttctcatcttattaataatagtgggaagtagttttgtaacctttggcatatattctgaaaaaaaagcttttccataattatgtgatgttgcaagttctgcgtcttgtatttctgaggaactatctaaaatacaaacgcctgatcttggcattggaatatccaaaagaatagccagccgataacacaaatactcattaaaaagcactagattaccttccggtccattatataattttgtaacgacctgtgtcccatcttccaaaatagcaaatttggggtctgtagaaccaagattcatattgtaacataattgactaatttttggctcgttaatgaatatcacctcccaataactatatatttattctatcagaaaccatctaaatttacgagcaatttttcactttaaatttataatattgctttatatatcttctactacattgattttttattcttcttttcaacctcggtctgtgtatttctgaacactttcattcgcttaatatcgtcctttgtagcttccattcactagtgagaatatatatattaagcgtatctcctatattacactagagtcataaactatcatatcccttgtagtacttaaagaaaaaatcagtaaattattttcgtgttgttttctccctgcaaattccttccatacattgattttactgaatatttaaaaagttctttacagagtgaatataccaaagcaacataaaaagagagaatgtcctcaaacattctctctcatttacataataaaatatcaccttttctgttctcttaaatacaatgcatatttccatacatcaattggcttaaaggcttactttttagcatttttacttgccatttttttacttaaaatcttctcttagtacagctttgctcctgccggaatcttgtcatccaaaatcagaacgttcagtccttctcttccttctacaaggtgtgtagcagaaataatcataccacaagaatcaattcccatcatcttacgtggcggaaggtttgtgattgcaagcaatgtctttccaaccagttcttccggctcataataatcgtgaataccgcttaagatcacgcgatcttcaccgcttccgtcgtctaatacgaacttcagaagcttcttagattttggaactgcttcacattcttttacctttacagcacggaaatcggacttgctgaatgtgtcaaaatcaaccatatcttcaaataatggctctacttctacatttgaaaagtcgatttcaaccttagccggctctgcgtcttttgcagaagctgtgaaggttgcctgcgcaccgttcttttctgccggagctgctttcttagccgcatcagcgccgattgtcttcattgtcgggaagagcagcacatctctgattgctgcgctgtttgtcaacagcatacacattctgtcgattccaaatccgataccacctgtcggaggcataccgatctccaatgcattcaggaaatcttcatctgttgtgtttgcctcatcgtctccctgcgcaagcagttcttcctgtgctttgaaacgctctctctgatcgattggatcattcagctctgagtaggcatttgccatctcccatccattcataaagaactcgaaacgttctgtatattccggattctccggtttcttctttgtcagcggagaaatctcgattgggtgatccataacaaatgtaggctggatcaaatgttcctctgcaaattcctcgaagaacagcgccaggatatcaccttttttgtgacgctcttcaaactctacatgatgctcttttgcaagctctcttgcctgttccagtgtctccacttcattccagtccacacctgcatatttcttcactgcatctaccattgtgattctctcaaacggttttcctaaatccatctgcacaccattatactcgatcacagtggttccaagtacttcctgtgcaacatgacggtacagattctctgtcagatccatcattccattgtaatctgtatatgcctgatacagctccatcagcgtaaattctggattatgtcttgtatccagaccttcgttacggaatacgcgtccaatctcgtatacacgctccattcctccaacgatcagtctctttaaatacagttccagagaaatacgaagtttgaaatcttcatccagtgcattaaagtgtgtctcgaatggtcttgccgctgctcctcctgcattggatacaagcatcggtgtctctacttccaggaatccctgtccgtccagatatcttctgatcgcacttaaaatcttagaacggttgataaatgtctgttttacatctggattcatgatcagatccacatatctctgacggtaacgaatatctgtattggtcagtccatggaacttctccggaagaatctgaaggcttttggaaagtaatgtaacagaagatgcatgaatagacttttctcctgtctttgtttcaaatacttctcctgtgattccgatcacatcacctacatccatctttttgaactctttataagactcttctccgatgctgtctcttgcaacgtaagactggatatttccctgtaaatcctgcacattacaaaaagatgcttttcccatcacacgtttggacatcatacggcctgcgatggaaacttcttttcctgccagttcttcaaaattctctttgatctccatgctatggtgtgtctggttatattttgtaattacaaacggatcttttccgtttgtctgcaactccgccagtttttcgcggcgaacttttctcaactgattcaaatctggttcctgctgtgcttttttctgctgttcggacacgatattttctccttcctttttcgggcatccggtacacttttatgtgttccctaaatgcgaatgaagaccccttgtaataaaggggtctggtttctactacatcgagcggctgatatcaagtactttgtactggattacgcctgcctgtgtttctacatctacagtctctccgacttttttacccatcagtgcctgaccgaccggtgactcattggaaatctttccttccagactgttcgcttctgtagaacctacaatgttgaattccatctcttcgtcaaatgtaatgtcaaatacttttactttacatcctacattgatcttgtctaaatcaacttcatcctctactacaacttctgcatttttcaaaataccttccagctcttcgatacgagcttcaatatctctctgctcatcttttgctgcatcatactctgcattctctgaaaggtctccctgttctctggcttctttgatctttcctgctacttccttacgttttacaactttcagattttccagttcgtcctccagtgctttcaatcccgcataagtaagtaatttcttctttgcctctgccatacctgtctgcttcctttctttcctgatttttcgcttttatcttaaactttatctccggcttttcctgcattttacaggatatttccgcctgtccagctctcttattcaagtatatttcacaatttcaatattatactcaatcgtcataacgatgtcaagagattttccagttctgcatagctctccacttgattgatctgatctctcaaacgcgctgctccatgcagcccttttgtataccacgccacatgttttcgcatctcccggattcctgtaaaatcgcctttgtactcaatctgaagcctcgcatgacgaagcatcgttttcttgatttcttccacgtctggcctctcgggaagctttccgcttctttcatattccaaaagctctgaaaagatccacggattgccctgcgcacctcttgcaatcatcaccccgtcacatcctgtctgctttcgcagggcaattgctttttctccggaagtcacatccccattgccgatcaccggaatggaaaccgcctcttttacctgacgaataatctcccaatctgcttttccggaataatactgctctcttgttcttccatgtaccgccactgctgctgcccctgcttcctcaataatcttggcaatttccacagcattgacatgctcatcatcaaatcctttccgaatcttaaccgtaaccggttttttaatcgcttttacagtggcactgaccagttcatataccaatttgggatttttcattaacgcagaaccttccccattgcgcacaactttcggcaccggacaccccatattgatgtccagaatggaaaatggacgctcttcaattcgttttgccatttcactgacaatcttcggatctgaaccaaaaagctgcagggataccggaatttcttcaggatgaatctgaagcagactttctgtatttttattgttatagaagattcctttggcactgaccatctccatacacagcagtcccgcaccctgttccttgcaaagcaagcgaaatggcaggtctgttacacctgccataggtccgagtatatacgaattttccagtaaaacatttcctatctttagctgtttcatttccacgctcttactctttctttcatttcttttttcatccaactctattcttcgaggtctacctcttctcccagataaaacaccttataaaacaattccagcgactcaaacaattcctgttttgtctgctgcagctgtttgatctttaacacacttccaatctcatcaaaggaaaaatcattttcctcgtggtctaccctgagttccagattgccttcctcatcataaattaccatcagaattccaccgacatcttctgtgtaaagtacacacataatgttcaattcctgtttgatagtctccggcagcatttcaaactctggattcagatagtatttctgttcataagagtttgccgcacaaagcacaatttcttcttccattttctgtttcctttctcatatgactatacatatccgtagattccccgtacagacacttctcctgcataaatcgccgtttcacttccatccgcttttctcacaatcagctctcccgcgtcattgatcccaagcgcttctgctttccattctccttttggttccagaacccggacttcccgcccgcaatttacaagcaatgcatcatatgcctcccggattcccgacaggtcttccgttttcatgaactctgaatatgcctgttcaaaccagcgcagtatggacgcaatcagaggacttcgcctgatacgacatcctgtttccatccgaagtgatgtggctgtctctgacagtgctcccggaaattcttccagattcgcattgatcccgatcccaatgaccacataattgatatagtcgatctctgtactcatttctgtcaaaataccgcagattttcttcccgtttataaccagatcattcggccatttgatctgcacatctaaattggtacattcccgaatcgccatcgctgccgcatacgccatgaccagcgtcagcatcggcgcttttaccggtaggatctccggacgcaggaggagtgacatataaatattctgatccgccggggattcccaggttcttcctcttcgtccctttcctgcactttgctgtcctgctgctaccagagtcccgtgaggagcctgctgatcccccagtctttttgcctgaatattcgtagaatctgtctctgcaaagtaataaacatttttccccgcccaggcagtatccatctgactgacgatctcttcccgggagagaatatccggaacagaagagaggcggtaccctctgtttcgtaccgcttccacttcgtatccctcttcctgcagttgtttgatcactttccagactgctgttctggacacctgaaactgctcacagagctgctgtccggaaacataatcctgactttcccgcagcatttttaaaatttccgctttcaattacatctctcccagtgtagctgccatcacagctttgatcgtatgcatccggttctctgcctcatcaaataccttggactgcgcagattcaaatacctcatctgtcacttccatgtctgtgattccaaaccgttctcccatttcctttccaatctttgtcttcagatcatggaatgccggcagacaatgtaaaaagatcgcagattcttttgcatttgccatcacttcttttgtaactttatatggagacagttcacggattcgttcttcccagacttcatccggttctcccatagatacccatacatctgtacaaataatatccgcatcttttgttccttctttgacatcttctgtcaatgtaataacagaaccggactcttttgcatatcctttgcatgtctcaaccagttcttcattcggaaaatatttttccgttgtgcaagccacaaaatccagacccagcttcgcacaggcgatcatcagagaatttcccatgttatatctcgcatctcccatatacaccagtttcaaaccttttaatgttccaaaatgttcacggatcgtcagcatatctgccagcatctgagtcggatgatactcgttagtcagtccattccaaactggaaccccggcatattttgccagctcttctacaatttcctggccatacccacgatactcaatgccatcatacatccttcccaatactcttgcagtatcctcaatactctccttttttccaatctgggaaccattcgaatccagataggtagaacccatacccagatcatgtgcagcaacttcaaatgcacagcgcgttctggtgctcgtcttctcaaaaatcagagcaatgttttttcccttatagaaatcaaccggctcgccgtttttctttttctctttcagatctgctgccagatccagaagatatgtgatttcctccggtgtaaaatccttgagtgtcaaaaagtttcttccttttaagttcatagttctgttcctttctatctgaatcaatgtgtgtgtaaatctcggaagatgaatcggatcttccagtttctcataatgcgcctgtaccagatcacggaactgatctatggtataaatctgatatttcggaatgcgaagcagcttcgcactggcctccaacattgccagatacagctctttggcagtgcatcccatgggaagtttcagcacaaaagccatttctgctttctccatgtccgaaacctcctgcatcctgtcttcgtaccactgttcctcatgggtctgttccagataatacataaagccttccagaccatacagcatccgttttgcatcataatatccgatcttcagattctgccggcttcttctgctgtcaaattccagaatgctccccaggcgtactctcgggctaatctcgtagatttctccgtcttccgggatatttgcccgcggttctctgccaggaccgtgaatccggatcgtaatgatatctttatagccccgatccaaaagagaattcaacgggacattattgattacaccaccatcaatatagcgtttcccctgtaatttttcatttttaaacccaagcagataggcactggctaggaggaaatcttccagggctccctgcgggatatcttccagcgacagatccagttctttcatatctgttacagaaaacgtcaacaggcaaaattctttccctgaatttcggattttctcttcatctaccatctcatggatcaaattgcggagcggtgtaacatcgactccgccgtctgccaacttattccagagttctgaaagcacttcttttacagtcccctctttgcgaaacagatgacgcatccactcatcatctacatccatgacccgggaaaatttcatctctgcccagatcttctgcgcattttccacgctgtccatgcagatcagagcaccatttaatgcacctaccgatgtccctgccactgcgcatatcttcacaccggcctctgccaatgccgtccatgcaccaatctgatatgcgcctcttgcgcctccgccatcgagtacaagaccatattcttttgtcagatctaacaacgcttccatccaatcactcctgtcaatttctgaaaatgggttatcctcgtctctgtctgctgacttcaaacatcaaaactgtagcagccactgctgcattcaatgactctacctgtccgcacatcggaatccggatccatgtatccgcacactgcgcgatctcttctcgaagtccgtttccttcattcccgatcaggaaagcagttccctgtctgtagtcttctttatcataagtattgtctccacccagatgcgccgcatagcttttgatgttctgctccttcaacgccaaaatcgtttctttcagatcttctacatatacaaacggcattcgataaagcgctcccatggtggaacggatcgttttcggattataaatatccacacaatctttgctcatcacaattcccgtcacaccggcagcctctgcagtacgaaaaatcgttcccaggtttcccggatcctgcaggttatccaaaatcatcaaatgtggaattcctcttccggtcatctgttccaatgtatactccatctgccgcactactgccagaactccctgcggggtcttcgtatccgacacataggaaaacactgcatccgacagaatctccgacttcttctgaatctgttcccggatttttgtatttcctcctgaaattgcatcgaacacttcttctctatattttttcccaaaactttcagaaaagtaaaggctcaccagacgctcacagggtgtttctctcaccatacggattccctctgcaacaaaaactccttcccggcttcgcactttactttttttctgtatttgacataactcttttattcgttgattacttgtacttgtgatcatctttcctacttccatgtatgaaatttttccaaaacatccgttgcaccgatcaggattaaaatggctccatccggcagtggttcatatggatctaatgtaacctctacccgctctccctgcatgatcccaaccacattgattccatattgttcacggatcttcagctcactgagacttttgccaatccatttttccggaatcacgacctctgccagactgtattcggaagagagttcaatccagtctgtaaaagcagtagacatcagactcttcgccactcgctctcccatatcacgctccggataggcaatcgcatctgcccctactttttccagaattgctccctgaagttcgtcctttgcctttgccagaacatatgggattcccatctcttttgagatgatcgtagccataatacttgcttccagactttctgataccgcaacgatcgccccatccagattccttccgcccaatgcctgaagtgcatccggatctgatacgtccgcccgcatcgcataagagaccatatcggaaatctcctgaatcttttcatatgatttatcgactactaccacatcgcatcccagattttccagagtcagagcaacgcttctcccaaaactgcccaatccaaatactgcaaattgttttttcatgtcttttttcctcttctatcctaacataatccgtttttccggcaaatctctgaattttgccttcatatcttctcttcccgaaaataccagtgccatcgtgattggtccaattcttcctacatacatcagaatcatcaggatcacatgacttcctctggtcagagctggagtcagatctgcagaaagccccactgttccaattgcagaagtggcctcgtatattaaatcaataaatctctcatccggttccaaaattgcgattccaaataacccgaccagccagattgcaaatgttagaaatacaattgcaattccggaacgcacattggtttctgcaagacgtcttccaaaacattctgttgattttcttcccctgattactgctgcacaagtaagcagcagaattgccatggtagttgtcttaataccgcctgctgttcctcccggtgaacctccgataaacatcagaatacatccaaacagcttagacgctgaagtcagctctgcctgaggaactgcagcaaaacccgctgttctcgttgtcacagactgaaaaagagaagcaaggaacttttctccaactccaaatgttccaatcgtcgcatcattgtgatactccaacagaaaatatcccaatgttcctgaaagaatcaaactgaccgtcataatgatgacgattttagactgcagatgcaacctggtaaacatccgttttaacggacgtttctgtcctgccacatcctgcagattcatacgcatatcatgccatactgtaaaaccaagcccccctgctacgatcaaaaacatggtcgtcagactgatcagcggtgacttaacatattccataaaactggtggtgcccaatatatcaattcctgcattacagaatgcagacacagaatggaagactccatatgccaatcccttgataaatccatactcaggcacaaaatgaaatgaaaataacacagctccgattccctctacgagaactgtccctttcagaatacggataataaaacgtaccagcccgctcagcgtctctaaattatacgtctgctggatcatgactctgcttttcatcgtaatctttttgcggattgccagaaatactgccatggtacatgcgatcacgcccagtcctccgatctggatcagcaaaagcagtatgatcttgccaaatactgtaaactgtactgccggaacgaccgtcaccaggccggttacacacactgcagacacggatacaaacagcgcatccagatatgcgatcggctcctgattgctaatgggaagatacagcagaatactgccaagaaaaatcactcccaaaaaaccaaatgcaatgatctgcatggtgctgaatgttactttttttcttttttcctgaattttgttgtgcaaattatgccagtctgtcttcatctctgttttataccttaaaccggtatcctaccccccatattgtctcaatatattgcggatgagatgtatcatactcgattttttcacggatctttttaatatgcaccgtcacagtcgcaatgtctcctacggattccatatcccagatttcccggaataattcttcttttgtatatacatggttcggatgtcctgcaaggaatgtcaaaagatcaaactcttttgtcgtaaaggaacgctcttctccatttacccatactcgtcttgcggttgtgtcgatcttcagtccacggatctcaatcacatcgttttcttccacattgcttccgatcagacgctcatatcttgataagtgggccttcactctcgccaccagttcactcggactaaatggttttgtcatataatcatccgctcccagtccaagtccccggattttatcaatatcatccttctttgcagaaaccataatgatcggcgtattcttctgactgcgcacctcacggcagatttcaaatccatctacccccggcagcatcagatccagaatgatcagatcaaattcctctttcaatgctttattcagtccagtctctccgtcattggccacttctacctgaaatccactcaattccaaatagtcgcgttctaagtctgcaatactttcttcatcctctacaatcaatattcgtttactcattcattggtacctcctgatattttctaattacaaaatacatggtcgtcccgactccctcttcactggtcgcccagatttttcctccatgttcttctacaattttcttcacgatcgacagcccgataccacttcctcctttggaagaattccttgatgcatctgtccggtaaaaccggtcaaatatattcggaaggtcttttgccgcgatcccttttccattatctcccagttcaatctgaacaaaatctcctacatcctttaaattcatagtaatgaccggatctgacttatccatatattttaccgaattgcctacaatattactgatcacccttcgaagctgttccggatctacaatgacttttgaatccacttccagataattccggtaccagaactgtacgccctttgattccagttccatagacaaatcttccgcacagtcgccaaaatactgttttgccgaaatggtcgtaaaattgtacggaatacggtttgtatcaattttggaataaaaagtcaattcattgatcagaagatccatctcgtttgctttattgtagatcgtcttaatatatctgtccatcttttccggtgtatctgccaccccgtccataatgccttctacatatcctttgatggctgtgatcggagtcttcagatcatgtgaaatattactgatcagctctttgttttctctgtcatatgcgaccttttcttctgcgttcgctttcagtctcaggcgcatctcctcaaagtcctgacaaagctgtccgatctcatcattcgtctcatttttgatctcaaagtccagattcccttctttgatattacgcgctgctgcctgcagtttcgcaagcggaactgaaactgtccggtagatccagaagatcagagccgctgctgtaaaaaacacaacggtcagatacagatcctggatcccactcaccgcccgcggtgcaaatgccgtcattgcgatggttgtaaacagtgtcggcagaatcatcacgatcataaatgcgagaatcagttttgtctttaatttcatcttcatcgcctccgcatcttgtatgctctaatacagaaaagaggacagtccctggtgcaggtacctgtccttcttttcattttccgcacctctttcgtactactataaaccaaaagaggcgttccgtctactattataaatattttttcaacacttctgctttgtccagtttctcccatggaagatccagatcatttcttccaaagtgaccgtaagaagaggtctgtttgtaaattggacgtctcaaatccagcattttgatgattcctgccggacgaagatcaaagttctcacgtacaatatcgaccagtttttcttcggatacttttcctgttccaaatgtgtcaaccataatcgaagtcggctgtgcaacaccgatcgcataagaaagctgaatctcacatttgtcagccagtcctgctgctacaatattctttgctgcataacgtgctgcatatgctgcagaacgatctacctttgtacagtcttttcctgaaaatgccccgccgccgtgacgtgccattccaccgtaagtatctacaatgatctttcttcctgtcagtccactgtctccgtgtggtcctccgatcacgaaacgtccggtcggattgataaagaattttgtatgctcatctaccatctcagctgggatgatctcatcaaatacatattttttgatatcttcatgaatctgttcctgtgtcacatccgggtcatgctgtgtggaaagtaccactgcatccaaacgttttggggttccgttttcatcatattctacggttacctgagtctttccgtccggacgaagataagacagtgtcccgtctttacggacttttgtcagctgaagtgccagtttatgtgccatagcgatcgggtatggcatatactcttctgtttcgttggatgcatatccaaacatcatcccctgatctcctgctccgattgcttccagctcatcctctgacattttattttcttttgcttccaatgccttgtctacaccaagtgcgatatctgctgactgctcatcaatggttgtcagtacgctgcatgtatctgcatcaaatccgaattttcctctcgtatatccgatctcacgtacagtatctcttacgattctcggaatatccacgtacgcttttgttgtgatttctcccatgaccatgaccataccagttgttacacaagtctcacatgcaacacggctcattggatcctgctccatcaaagcatccaggatcgcatctgaaattgcatcacaaatcttatccggatgtccttctgtaacagattctgacgtaaacaataatttttccattttgctcctccttctttggttctttctcttttttcggactgtatcttctctaacaaaaacagcccgccaaaaagcggactgttcttttccaaaacaatcctcttattgttcgattactcgctcaggttggcaccttccttgaacttgaaggggttgccgcagcttctcaggtcctttgtacctccactgctctgaataagagaaagttttcatattcattcttgtaacaatagaactctacaccgtatcgataaaaatgtcaatatagaattctactttttctctgtaacgactccattttcgtcaatcgctgcatttggacacagtgcagcaactgcatcatacatctttttctgcttctctgcagaatccagatactctgtcatttcttctgtctggattccgggaacgatcgacatctctttcaagccttccgatgtaatctgaagctttaacactgtcgcatatctactggttccatctgtcaatacagatcccatactatacacaaccggttttccatcaatgtactcaattccctgcagacgatcagaatgtcctccgatcacgatatctgctcctgcctgtagaaatgcagctgcatgctctttctggtaggactcgacaccattggcgtctccttttccttcgtgatcatacacgatcagatagtcgcatttggacgcagcttcttgaatgatcttcgtatactgctctacctgcgtatattcttgaattcccgcttttccttctccggctgccatgtcataagtatcttccattccagaggccgctgtaaatccaatcttcattccatccacgatcaaatacaccggctgggatgcttccgttgcatcaactccggctcctacatatgtcattcccgccttctttagcagttccagattctcctttaatgcatcctgtccaaaatccactgcatgctcatttccaagagaaatgacatctgctcccagagattccagtatcttcattcgatctgcattggcatgcagaatcgatgttttgtcagataacgcttctcctgtaccactgatgctgcattcctgattcagaaaaagtacgtctgcacctgtcattgcatcgagaagctcatcagagagcattgcgcttaaatctcctgtctcgtcgtatttgctcagcgtatatccttcttctgtgagcgtcagattgcctgctatcgcaatctctgcctgtccgtcatcttttccatctttctgactgatccggttctttgccgctgtctcatcgtcttttaaatagcccttatactcatcagacaacacatgcagtgtcttgccataactgttgtaaaaatcttctgcagatacctttccggacttcatcgctttctgaagctttccggaagaagcatctggataagtcttctggatccatgccgcaaatgcttctgcatcctttttcacatcttctgcggaagcatccggatcttccttcaacataaatgtctcatacccggtactgatcgcactggcaagtccgctttcagccttcttcgatgtatcatttggctcacttttctttccttttatactaaaaaacactgccactgctgccgccacgatcacaatcagcgcaatgacgagaatcatgacctgcttctgtacctgttttttacgttctgcttttttctgttctcttactgcttcatcgtatcgttcactgctcattttctcttttgaacctccctgtgatttatcaaaagatgcagaacgtaccgtcctgcatcttcactcccccgttctatatcagcctactttcagcttaaacttctgaatctctttctcatcagaaactttttcgatgattccgccaagaccacgcagtttttcttcaaatctctcatatcctctctggatatagacaatatcatccacaatggtgattccgtctgtcgcaagccctgcaatacaaagtgcagctccggctcttaagtccggtgcactcactctggctccggagaatttttctacgccttcgatcgtcgcagaatttccttctactttgatcacggcacccatccttgcaagctcatccaaatacttaaatcggttctcaaaaatactttctgtgatcgtacttgtaccctgtgcaagcgcaagcaccactccaatctgcggctgcatatctgttgggtatcccggatatggcaatgtcttcacctgtgtactcttcagacgcttctttgccaccactcttacggcatcatcaaactcttctacttcacatccaatatccaccaacttggaaatggtcgcatccaaatgcttcggaatgacgtttaataccgtcacgtcccccttagttgctgccgctgcaaacataaacgtaccggcttcaatctgatccggaatgatggaatattctgtcttatgaaggcttttgactccgcggatcttgatcacatcagttcccgccccacggatattcgcacccatactgttgaggaaattcgcaacatctacaacatgaggctcttttgcaacattctccatgatcgtaaggccgtctgccatagctgctgccatcatcacattgatcgttgcacctaccgaaaccacatcaaaatacagatgagttccccgcagctgctctgcttctgctacgatctttccatgttcaatatctacatccgcacccaatgcacggaatcctttcaaatgctgatcaatcggtctgcttccgatattgcatcctcccggcagagctacttctgcccttttgtactttccaagcaatgcacctaaaagatagtaggatgctctgatcttcttgatataatcatattctatattaaaatctgtaattgcgcttccattgatcttaacggtatgtctgtcgattctctgaaccgttgctccgatcccctgaatcgcctccaacaacacattaatatcatttacatccggcagattgtcaatcagaacggtctcgtctgtcatgatcgctgccgcgagaatagccagtgccgcatttttagctccgccgatttcaacttcccctaccagcggattgccgcctttgataatatactgctccatattgcacctcgattatcgataattctatcgtagtcccttgttaaacttcattactcccgtcttataacgaaaaagaaacgacaattcgcctttttaccttataatacgattagttattataccataaaatttcaatttgtaaaatcattttttctccagtgcctcaatctgcgccagaactgcatctatcgtttcttcgatcctgcatccatcttcacagattgtaaggtctgcatatttttcaaaaagttttgttcgttcctcatataaatcccggaaagtctgcccttctctcagtacaactccccgcttctttggactgcgaatcctctcttttattgttcgataagaagcttttaaatataccactgttccgatttctttaaaatgtttcatcgcctcttcacaatatacaacacttccacccggagaaatcacggcacgctcggcattcacctgacaattcacctgattctcaatcgcaaggaatccgtcttctcctacatctgcaataatctctctgagcagacgtccctcctgcttctgaatcagcaaatctgtatcaataaattccattccaagccgctttgcgaccacaactccaactgtactttttccaactgccggcattcctataaaaatcagatttttcatgtgcatttcacccttattttccatagtttctaaaaatcttttatctctgtatttcatgtctgtatcatttttatcatatcataaaatctgcaattagtaaattctgtgccggcatctgcggtgtcggcatcttctctgatataactcatgataaagcatcacctcgatcagatcctgcatccagttcggtgtacgcccgcgctttcctgtctcctgccgattctgctcctgcacctgtgcaaactccggttcccactccgattccggttcctgcatccgttctgcctcttccatttgtatcacactgttttcttctgcctgggaaagaagctctccatattctgtcccataaaacactttttcgtgtttccttacattttcacacactcttttgcacatcagatgcagctgcagacgatccggatactcatcatacatcatactgttgtcatattccattctgtcacattcttcttccacataagggagaatccgttttgccacatctggataaagacttttcatgtactcataatctctgcgttctttacgttcatcatcatactgcagcggcaaagggtacgccatataatatggtaatttttggttcatagctcacacttccatttcagacattatatgactactatatgtattttttgaaatattgtgatttttcgcaaaatctgatggtgtaaatccggtctccctcttaaatgctttcgaaaaataactttggctggcaaatccaagattttcggcaaccatagatacctggctgccttcctgcaataactgcttcgccatattgatctttcgctttagcagatatttatggacaccgattccggcgtacttatcaaatatcctttttaaactggcatcactgatattacagtattttgcaatttcgctcaccgttggctgacaattcaactgctgatttaagaaattaatcgcgttgcggaaagtaattgcatctggagcgaaagaaactgacgatacggttccctgttccgcaagactcaaaaacaattggcaaagataacttaccaccatttgagaataatatggatattttgcaaagggctgcaaatagtaatgctctattttttctgtttgcacatgaattgcgtccgttttgttcttcatatatataagtaaagaagcgatcatttcttcctgttcgatcgacaattgaaatactttatcatgaagccagagcgtaagcggtccatctgctgaaaaagagaaaatcagcaggtttgcaccctccacactctttactgtgaatttatgaaactccaatggcttatggaaaataagttctccctgcgccatattataaattcgttcatccgctgaaacgcaaagctctccatctaaaatatacagacattcccaaaaatcgtgcgtctcaccggaaaattcaaacccacactcataatgactctgaaacagggagtgcatacttgttatgtggatttgctccatgatcggaattgccggaaatttgttttctgtcaatatgttcccctccatatttgatctaaaattacatatttttggacttttattgcatagatttgtttttttaatacctgtataataacattaacgaaaagtcatgtaaagatatggagggaaacaccatgaaaaaaccagtattagtcattatggctgcaggaatgggcagtcgctatggaggcttaaaacagatcgatccgatcgacgatcagggacacatcattatggatttttccatttttgatgccaaaagagcaggatttgaaaaagtggttttcatcatcaaaaaagaactggaaaacgattttaaagaagtgatcggaaatcgtcttgcaaatgttatggaagtagaatacgttttccaggaattgaccaatcttccagaaggattcgaggttccggaaggaagaatcaaaccttggggaactgctcatgctgtccttagctgcatcgatgtcgtagatggtccttttgccgtgatcaacgcggacgattattatggaagagacgccttccagaaaatttatcatttcctgtccacgcaaaaagaagaggatacctatcgttttgcaatggtcggctatcatttaaaaaatacactgacggaaaacggccatgtagcacgcggtatttgtacagtagatgaaaatggctgtctggtcgaagtgaccgaacgcactcgtattgaaaagagaggggaacaggccgcttttacagaagatgatggtgcttcctggacagaactgccgatggattccattgtctctatgaatatgtggggattctcagaaggatttctccaggagatcaaagccggattctctgattttctgaaagaaggattgaaaaacaatccattaaaatgtgaatacttcctcccaactgtcgtaagtaatctgctcaaagagcatcgtgcaactgtgtctgtacttacttcaaatgacaagtggtacggtgtcacatacaaagaagacaaacaagtcgttgtcaatgcaatgcaggctatgaaagacgccggtatctatccggaaaaaatctggtgtggggaaacagaagcactcctgaatttccagcttgacggaactgcgatgagtgctgtgcgctacggaagcggacatatcaatgatacttttttagtttctttaaagaaggaagatgaaaccgaaggccgtgtcatcctgcagcgtatgaataaacacattttcaaaaatcctgaagaactaatggaaaatattttgggagtcacatcgttccttcgcaaaaaaatcattgaaaacggaggcgatcctgagcgcgaaacattaaatatcattccgaccaaagacggaagttcttattttgtagattcagaaggagaatattggagatgctataattttatcgaaggagctacaagctatgatcaggtggaaactccggaagatttctatcaaagcgctgtttcctttggtaatttccaaagattactggctgattatccggcagaaacccttcatgaaacgatcaaaggattccatgatacaaaagcccgcttcgaaacatttaaaaaagctgtagacgaagatatttgcggacgtgcacattctgttcaggacgagattcattttgtacttgcccatgaagatctcgcaaatgcattcggcgatatgcttgaaagaaaagaactgccgcttcgtgtcacacataatgatacaaaattaaataacattatgatcgataacgaaactcacaaaggaatctgtgtcatcgatctggataccgttatgcccggtcttgccatgaatgactttggtgattcaatccgttttggtgcaagcacaggtgcagaggatgagattgatctggataaaatccagtgcgatatgaatctgtttgatatttatgcaaagggatttattgaaggatgcggcggaaaattaaccgaaaaagaaatcgaactgctgcctctgggcgccaaagtcatgaccttcgaatgtggtatgagatttttgacagattatctgcagggagatacttactttaagattcaccgtgagaatcacaacctggacagatgccggacacagtttaaactggtatctgacatggaagcaaaatgggataccatgaatgccatcattcaaaaatataaagaaacgcactaatacaaaaggggggctggtcacttggaccgcccctcttgctttcttacggattctattcctgcatcttctctttataatgatgtgcatcttccaacatcatatcttttaccttcatcagacggatctgtgtgcttctctcattttcatccagtttcattgtaatatatttaatattttcctctgcctccggaatgatcacatgctctaatgcattgacacgtcgtctcgttttttcaatctctgctgccatcaactgacatgccttctcacattctgccagacggatcatatccggcagaatatctgccagagacttcaccgctccgtccagatcactggatgtaaacgcaaacccatatgagtaaatatcattttcatcggccgtccttgtctgatatgcaaatgtaggaatgttgacactcatgatgtttttctctcccggtgtcagcataatcccctgctttggcgccatcagtgcagtattcaatgcctgctctgacatgcctgccttcgcgatcacaaaatttttatttgctgagagaattccggcttctacacgtttccgtacttccatattttcccgcaccagatccagatactgacgcatcagctcatcccgtttatctttcaaaagtttgtggccacggattgccgtaatccttttctttttcaagcgggtcaattccatacgggtaggattcacctgttttgatgccatcgtttctcacctctctttccgggcatatcatttatgcctgataatactgatccaaaaacttgtcgtcaatacgtttcaactcggttcttggcagcatggaaaggagtttccacccgatattcaacgtctcttcaatgcttcgatccgtattatatccctgagaaacatattccttttcaaatgcatctgcaaattttgcatacatcaggtcaatctctgtcagagctgcttctccaaggatcaccatcagctcttttgcatcttttcccctagcataggctgcaaacaactgattcatcgtattggaatgatccgctcttgtcttcccctctccaatccccttatctttcagacgggacagcgacggcagtacgtcgatcggaggtgtgacaccttttcgatacaattctctgctcaaaataatctgtccttctgtaatatatccggtcaggtccggaattggatgagtcttatcatcttccggcatagtcaggatcggaatcatcgtaatgcttccctttttgccgttctgacggcctgcacgctcatacatggtcgcaaggtctgtgtacatataacccggatatccacgacggcccggtacttcttttcgtgctgcagacacttcacgcagcgcatccgcatagttggtaatatctgtcaaaataaccaacacatgcatatcacgctcaaatgccagatattctgcggcagtcagcgccattttcggtgtcgcaattctctcaatcgcaggatcattcgccagatttacgaacagaactgtccggtcaatggctcctgtttctttaaaactctccacaaaaaagttggactcttcaaaggtaattcccattgcagcaaatacaaccgcaaatttttcatccgttccaagcaccttagcctgtcttgcaatctgtgcagccagtttcgcatgcggaagaccggatgctgagaagatcggcagtttctgccctcgtaccagtgtattcaatccatcaatcgcagagacccctgtctgaatgaattcctccggatagcttctcgcagcgggattcatcggaagtccgttaatatccatccgcgcctgcggcaaaatctccggtccattatcaatcggtcgtcccagtccgtcaaacacacgtcccaacatatcctcggatacaccaagttccatacttcgtccgagaaatcttactttactgttggaaagattgattcctgtagagctttcaaatagctgcaccaatgcatcatttccattgatctccagcactttacagcgccttgtctccccacttgcaagctcaatttctcccagttcatcataagttacattttctacaccgcgcaccagcatcaaaggtccggctacttcctgtatggttctgtactcttttggcatttagaagccctccttcccctgtgcagcggaaatttccgcatccagttcctgatttactttttcatattctgtatccagatcgtcctcgtgtacatacttgaaacgtccgatctgctctctgaccggcatattgatcagattctgcaaggatgcaccggctgaaagcgcctccactgctttctcataaaatgccatgaccaatttcatcatcatatactgctttttcagggatgtatatgtgtcaatctcatggaaagagttctgatgaaggaagtcttcacggatcgatctggcggcctccattttcagacggtcacccggtgacaacgcatccataccaaccatttttacgatttcttccagttctgcctcttcctgaagcagtgtcatcatcttctggcggccttccatccagtcagatgctacatttgcattgaaccatgtctccatatcatccagatacaatgaatagctgttcagccagttgattgccgggaaatgtcgtttgtaagccaatgcagaatccagtccccagaacacctttacgatacgaagggttgcctgggataccggctcagagatatctccacccggaggagaaactgcgccaattacagaaagtgcaccttctctgccttcttttccaagggagatcacatgtccggctctctcataaaactgtgccagacggcttcccaaatatgccggatatccttcttcacccggcatctcctccagacgtccggacatctcacggagcgcctctgcccaccgggacgtagaatctgccatcaatgctacggaatatcccatatctcggaaatattctgcaattgtgatacctgtataaatagacgcttcacgggctgccaccggcatatcggatgtatttgcgatcaaaactgttctctgcatcagagactgtccggtcttgggatccttcagttccgggaattcatttaaaacatctgtcatctcatttccacgctctccgcatccaatatacaccacaatatctgcctctgcccatttcgcaagctgatgctggatcactgtctttccacttccaaacggtcccggtactgctgccacaccgcccttcgcgatcgggaagaaggtatcaatgacacgctgcccggttacaagcggcatcttcggcggaagttttctctgatatggacggccttttcgcaccggccacttctgcatcagagtaagctcccgctctcctgtttccgttgttacaactgcaaccacttcttctactgtaaattcacctgctttgatctctttgaccgtaccttttacaccatatggaaccatgatcttctgctgtactaccggggtctcctgcaccgtaccgatcacatctccggtctctacttcatctccggccttgacagtcggaacaaattcccatttcagatctcgcttcagtgacggaacttctacacctcgcttcagattattgcccgagattttcatgatgtcatccaaaggtctctgaatcccgtcataaatgctggtgatcagtcctggcccaagttctacagacatgggaacttccatagactctaccggttctcccggtcccagtccggatgtctcttcatatacctgaatggacgcctcatctccatgcatctctataatttcgccgatcagtctctgcttacttacacgcacaacatcaaacatattggcatcgcgcattccagaggcaatgaccagcggtcctgctacttttttaattacgcctttactcattgccgaatctacctcccattattcctgtgaaaacaggatatccgaaccgactgcctgctccacggtttttttcacgccttctacacctgctcctgtattgccggacacacccggtatctgaatgatggcaggcatgacctgttctttatatcgctcgatctcttccggcagttctgctgccagcgcctctgtaatgtagatgatcccacattccacagccagatgacgcagcttttcttttccttcttcggcatctctgaccggacagatggaaagacccagtgtctgaaagccgtaaatactgtcataatctccaattactgctatcttatccatacatctccctgatcctttcccgaattgcctcttccggaaattgattctgttttccggtcagaatgattcgaacggtcttgatttcattttctcttgccacaatgtatgctaccagcggtcccacggaaaacgcctgatatttctgcggtctcattgtttcgatcatccgattgtcacaccaccgctcaaatgcagacggtgattcttccaaagcctctgctccgcctgcgtaagatgttccaagcagataatcccggattgcatccatgccatttgcagctgcttttgccaacaaatctgtctggatcgtgtcgcaaggtgccagagcacgttttaaaaactcctggctcttgcccgttttctgagcgcgaactgcaatcttgatatctgcgatcgccactgttgcttctgcatactcccggatgattgcatcttctgcttttctcccggcctcacagactgcatccaacgccgcccggtccaggatcacatcacataactgaccatctcctgtgtgaagcagtgtatcgtatgcttcctgaccagcctctgacatcatggatggaagacgcccaaattctttatttttcacaatctccagcatttgtgctccgggaatggaacaatcgttataaaacacgttccgatcttctgcgcctgcacaaactgccttaatcgctgcttttaaattgtgaaatatctttgtgtaagacatcacatcaaaaacagtcggatccggagcaatctctgatatgactttccacattttttcttcttcatgctgcagcatctgtgccggatcatgtacatcttccggatctccccagcctttttcgctcaaaagctgaagacactgtgtttcgttttgacatgccatcaattgttcaatgacactttgtgtcagcaaagaaccctccagtgcccgtatgcgcgcaaccgcataagtatattccaattcattcaagacgaatccctccttcttgctttctttcgctgctttccaaaaacggctgcgctctatacaaacaatactttctgtacaagatctgacagttcatccctctttgtatgaaacattgccttgattgtacaattctcttcaatcccgccataaaccagcacaaacccgccgtccatatctcttggctctttcgaaaccacaagatgaccacctttttcctgtgcagtctgttcgatcacattctcaaatccctgtggcatacgcttcagatcttcctcagaaaaatacaggattccgtcctgtggaagtacatacaactccaacatcttttgaagcatctcaaaatatgactccggttccagatgcagtatctgctgatacgccttctccagaacctcctgtatcacttcctgttttgcctgtaatagagcctgctttctctgcatctcacaggaagatgcgatgcgctgagtatagtcctttgtatcttcttctgactttttcatcagcaatgcaccctgtgcttccatctgctttcttgcttcttttaaaatttcttctgcttttacttttgcttctgaaatcttttcttccgctgcgtgatttgcttcgtccagaatctggcgtttcatattttctaatccactcattcttcacgctctcctttttctttgcttttcctgcttatacctgaattccgctgacagacaggaaagaaatcaaaagtgcaaggatcgcatatgtctctaccattgcagggaacagcatagctttaccaaactgctctggtttctttgcaacgattccgatggctgctgccgccgtctttccctgatatttcccggagatcaggcctacaattccaatcgggagacatgctgccaggatcagaagtcccgttgtcacatccacttctgcaagtcctccgcctaaaataccgatctttgacaatgtaataaatccgatcagcagtccatacagtccctgtgtacctggaagcagctgaatgatcaatacttttgcaaatttacttggatcttctgatacaacacctgatgctgcctgacccgcaattccaactccgatcgcagaacctgcacctgccagaagtactgcgattgctgcacctaacagtgcatatacgattcccaaattctccataatactcataattaagattcctccttaacatctacatattttgtatccggggcaaacggatgaaatgctcttccgcctccctcataaaattttccaaaaaattccacaaactgcagacggttcgtgtgtacatatgctcccagcagattgatcgccaggttcagtgtatggcctacaataaaaataataacaaagaagatcactcccacaatattattcggaagcatacttcccatctgattgatgactgatgcgatcacacccgtcgccagtcccaatgccagaagacgggaataggacagtacgtcactgagccatccggtaatgttatacaaatcataggcaccgagagcaagccgcaggcccggattctttttgtcccttccggacatcagaaggattcctgctgcgccgccgatcgccagaacttttgccaacagattcactgcatccggaaatacaatctgaatctgcgaaatggatgtaaaaatctcacttggaagcagcatcaggatcagccctgtcaaaagcatgaaccaaagcaccacatcacagaagaaatccatgatccgcttttctttcaggcacatatatcctttgatgccaagtcctacaaacagatggatcacaccaaacaacatggagtagatcaaaagtttcatcggatcattcaatggaataaaccagagagccggtatgctgaccgttgttccgaaaaacttctgagaaacaatatctacaatatttccaaaatatccgccaaacagaattccccagatcaatgtggaaattccgcaatacaaaaacatcttgatggactgatgcattccccggctcattcgcgggaatttcttcaaaataacgaaacatgcgactgcaatgatcgcgccatacgccgcatctgaaagcatcattccaaagaaaaacacataaaagaatgacataatcgtcgtgggatcaaactcccctttctttggaagtccataggactctacaattccctccatactcgcggaaaatgaattgttgctcaaaagtgtcggcgattcttcattctctttgatctcttcaatatcaatgacacacgtaaattttccggtcagcctctcttctatacgccctgcatctcttgccggaacatatcctgtgataaaaaacgtacgctctgactgcggcaattttccaagtacttcatacttttctgcccgtacacgataaatatccgccaaaatccgaagattctctcgttcacccgcaaaagactgcacctctttttcaattgcaagaatcctttctttacattccctgcatgtttgttccaattcggctcttacttgtgccggctctttgtcccagacctgggatggccttgcaaatccgtgatttcttaaaacctcttccagccgttctgcatcctgagtcaggcaaatcaccgccagatacacggtatctttgtcagaatggatgatcgacacatccacaccatcgatttccggcacatcctgtgccagcatctgataaatttcttccagtgtggcaagcggcatcgtacctagaaacatcactgtatgcgctgttccgctgtaagtcatcggcacacgaagactcatccacggagtcagactttccatactgttctccagctttaaaatcccggccttctgttccgctttttctttgtccagtgcaaggattttctttgctgtgcacaaaagtgattctttttgttccagcactttctggtaatcttcctgttcgatcagtgttttcccttccagcgcagaaaacatggatttcttttccggtgcataccgatccagaatttccagagcctgatctgcaagtgaagcactcttttcaaactccattcgttcctgtcttgtatccatcctcgtaaaatccggatcctcctccagagtctgcgtgatttccatcactttcatcctctgaagctgttccagaactgcctttcgatcttttttcagggcgcagatactgactttttgcatctgcagtaccgccatagtgtactccctccttttttaatttttgtttaccaactgagcgatcacagcgcttactgcctcttcttcttttcgttcagcaagctcctttaacgctttgacctccttctctgtctgtgcccggatctcctgctgaaattctccggcttttttctgcgctttctgcatggcttcctctgcagaaacccgatgtgcttctttctgcgctttgatcatctgctctgcttcctgcctcgcatcttccagaatcttccggcttttttccccagcttcttttacaatcacatccgccgctgtttcggtttctcggattgcctgaattgtttcttccaccatcgattcttcaccaccttcctttacatccccattacaatgcaactattttatgcattgtctgcgaacttaatgtcattataccgcaaacaacaataatgtcaaaatataattctatattattctatttttctgttaatttcacatatttttcacaaatgaacattaccatacaaacgatcatcaaaacagatatatcttacaaaatacccttcggatatgattttccggaagatctacattagtattatcaaaaaacaggacagtcattctcaaaataaaaagaatgtctgtcctgcttgttatctgtccatctccagttccggtcctacatgtttatgattgcgaatgatcgcatccatctctcttttgctgcacgatggaaggtctcctttgatcgtattcttcacggctcctgctgcatttccatactccaatgctttctggcagtcaaagtcatacgcaagaagtccatataaagcgcccgatacatatgcatcaccgcttccgatccgatccacaacttcgatattgcgatatggttcttcttcatagtagcagtcttctttcgcactgtaaatcacagatccgaatgtatgctttttcgggctgtgcacaaccctctgcgtagaagccaccacagaaatcgggtattcccgggtaaagctcttcatgatgctcttcgcatccccttcttttaaaaatgtcagtcttgcagtctcttcagagcagaaaaagatatccacatacggaagaatctcttcaatacaagcctttgcttccggacctgtccataaatttccacggaagttcacatcaaaagaaatcattgctccgttcgccttaaagcgcttgatcatctcaatcgctgtgtgccggatattctctcccagcgccaatgtaatcccactcgtatgaaaacatctcgtactccggaacatctcttccggcagttcccccagactgatcttgtcaaaggaagtatgtcttctgtcgtataccacacccggttttctcggatatgcaccattctcataataataaattccaagtcgggcatccggactgtcatcatatacgaggaaatcatcgctcactccacagaaacgcaccttatctttcgcataaattccaagtgcattgtccggcagctttgaaaccactcctgtgcgaagccctaaaatcgaaactcctgacacgacattaagttctgctccgccaacctgcttctgaaaggtctctccactgacgatccgctcattatccggcggagacaatctcaataaaatctcacctaatgacaacaaatcaaatctgttactttccatatcgattcctcctgacacttttctcatcgaaacgcattgatttcattatgtgaaaccaatttttatattgtggaactatttatttaaattatactacaagaaacgtcttctgtccatatttacctgaaaaaaaatgatctcaccgcatatctgcacgtaagatcatttttccctgtgttttctatttcattcttctcctgctaccagctcaattcatgcagatgtccttccagattcatatgtgcaaaattctgctggcgaagcgcctcatacaaaataatcgcaactgaatttccgagattcaaggaacggatatctcctaccatcggaatccgcacacaatcttctttgtggtttaccagaatctcttccggaatacctgcgctctcttttccgaacatgatgtaacagtctggttcgtactgtacttctgtgtacactttgggcgcctttgtagtcgccatgtagatcttcgcccctggatttttttccagaaaatcttcaaaattgatataggttcttacgtccagatctgcccagtagtccattcctgcacgttttaatgctttctcattgagtcggaatcccaaaggttcgatcaaatgcagccttgtatttgtagcgacacaggttcttccgatatttcctgtatttgccggaatctctggttcatgcaatacaatatttaacatgatgctctgccctcatttctcagtttttcaatgaagcgctccaatcttcccaacgccactttcaaatcttccagcgaatatgcatacgagatacgcaagaacccttctccgcaatctccgaatgcagttcccggaacaaccgccactttttcttccatcaggaaccgggttgcaaattcttcggaagtcataccgaattcactgatattcggaaatacataaaatgcaccaaacggctcaaaacattccagacccatacgcttgaactcatgcatcaagaaacgtcttctctgattgtaagactttctcatctcttctacttcattctcacaatgacgcagtccttctacagctgcatactgactgtttgtcggcgcacacataattgcgtactggtgtagttttaccatctgctcaatgatcagttttgggccgcagcaatatcccaggcgccatcctgtcattgcaaagcctttcgaaaatccattgatcacgatcgtcctctctcgcattcccggaagagctgctatggaaacgtgatctccctgataacttaattcggaataaatctcatccgaaagcacatacagatcatgcgccttgacaaactctgctaccggctccagatcttctctggtcatgatcgaacctgtcgggttatttggaaatggcatcaccagaactttcgtcttcggtgtcactgctttctttaaatcttccactgtcagcttaaattcattttcatactgaagcggaatgattacaggcacaccatctgccatgatcgtacacggaagatatgacacataacttggctgcgggatcagcacttcatctcccggatccagcatacagcgcagcgccacatcgattgcttcacttccaccgaccgtcaccatcgtctccttcatcggatcatacgaaacatggatctttcgctccagatacttgcagatttcttctcgaagttctttcaagcctgcattcgacgtatagaatgtgcgtcctctctccagagagaaaattccttcctcacgaatcctccatggtgtgtcaaaatctggttctcctacacccagagaaattgcatccttcatctcatttgccacgtcaaagaatttacggatgccggaaggctggatatctacgatctttttcgataatggatttctcattatggtgtcaccagcatcctttctgattcactttttgaagaaaggatcgttccgtggtctttgtatttcttcaaaatgaagtgagtcgctgtactgattaccgaatccagagtagacagtttttctgatacaaactgcgatacttctttcagagtctttccttccagagataccagcagatcatatcctccagagatcagatatactgcgtgtacttctggataattacagattcgctctgcaattttatcaaatccctgacttctctgtggcgtcatacgcacttcgatcaacgctgtcaccagttctactcctgctttgtcccagtcgatcagcgtatgatatccacagattactttgtccttctccatgtctgcaatttcattggcaacggtcacttcatccgttccaagtaaaactgccagctctgccagatccgctctgctgtttttctctatataatataaaatttcttttcggattaattctcgcttttccatcttttcattctccttattctgatcttaccttgtttgtgcctgctcttcccaccagcgcatcaattcatccggtgcaggccgatccagatagcgcacttcttctccgcttgtgattacttttgcatgatctgctgtcgtaaccccaagcacactggctcgtgcaccactttcttccagacaccgcacaagagcattgccatctcgggtaaccatcagaatggcgcctgttgaagtcatctgatacggattcagatgataatattcgcagacctctacacattcctgacggattaggatgcgggacatctccatctgcattcccacatctgctgcctctgtcaattcccacaaagatgccagaataccaccgcttccaatctgctgcattgcagtcaccagtggttccccttttggtgtattttcctgcttcacactgcgaagcgcatggaaaacctccagttctgattctattccctggatctgacgcataaatgccggaacaaaccgctttgaaagctcttctctcttctcatcgaaaatacgcagtacgccttctgctgcgatcgaaccacaaagtacgatttcctgattcggctccgcctgagcaagcgtacgcagctgtcctttttccacacttcctgccgcagtcaccgataccacggactggctcactgcaggactggtctctgcctttgcacatgttattgcaatcccccaggatgcacaccgttcttccatacagcggaacatctcttttaaccgcgactcataagcatatgttggcagaatcacctgtaccgaaacaccaattgccgaagccccccttgtctccagatccaacacggcacgcatgatcgcatataccccgatatttttggagtttccagaaactacagccgaagcaaagaccacatcttctgtgtccctgatctgtaccgcagtacacatctcttccaccgaaaggtctgtcagaatctcttttctttttgtatgcagttgtttcagtacagaacgttttaaaactgtctgtgatacatttccaactttcatcgtttccgtctcccttaaccctctatgttcctgttcgcaacagccacttttctataccagatatggcaggatcatcgtcgcgatcatcgcaacgaccagtaccagcgctccgatcgcaatcactcttttgactcttttatcattaaaatccactgttttcacctctttaaattctcatacccaatgggtattttaggttacattttaaactctttgcagtatttttgcaagaagcactgctcacattttggacttcttgccgtacaaatcgaccgtccgaaagtaatgatctgaatattatataagatccagtgatcttttggtagttctttcatcagatccgtttcaatcttttccggatcttcgttttttgtcaggccaaggcgtctggatatccgttttacatgtgtatctaccaccacactcggatcatgatagatgtttccccggatcacattggcagtctttctcccaacacctgcaagagatgtcagatcttccaggctcctcggcacctcgcctccaaatttatacagcagatctttcgtacaggcgatgatatttttcgctttattgtgataaaatccggtaggcttgatgtcttgttccagctcttttaagtctgcactggcaaacttttctaatgtgtcatatttctgaaacagatctgctgtcacaagattcactctcgcatccgtacactgcgcacttagcatcgttgcgatcagaagctgccacggtgtctcgtagttcaaatagcagacatattcccgcccatactgctcatccagaattgctaaaatttcttttgttcgttttttcatacattgtcagacgaagtctccctgctgcggacacgcattgtaggatgccccgtctcctccttctaccaaaaatatacttgcctggttcgtcagaatattccggtttctgtaatcaaataagatcagttttccattgatccattccaaatgggtcatttttcgaagctgtcgcttatcaaacccttcatatccttttaaatagtggtgctcttcttcctctttttcataaaatgcagcagcttcccgcttctcaatgttgatctcgcctgcaaattccggtctttttttcacattttcccgcaaatacaggtccagtatcaacatctgccgatagttttccacatctttttctacatgctctttgataaatgcgaacagcacttcataccgggtgattctggaatggttcatcatatgcagtccattttcttcataatagcggctcagattttcatacagaacaaacgtatctgtaaactcttcctctaataatcgcagtgtattgacaaactgtccgctgttatagtagacttctaccatttcctccacacccttcaaacggatcacatcgtcatacgaaagccatctggtagaaagcacttcaaacggcggccgatcctgatacaacagttcataatccctcgtcttctcatgcatataagaacctttcaatactttcaggaatccaagctgaagctgttctggatgcaagacatagacatcccggaaggactgtgcaaaccgctcataattttcatatggcaatcccgcgatcagatccagatgctgatgcacatttcctgttttctgtatccgcttcacgattcgttttacttcttcaaaattcatctttcggcgaatctccgtgatggtctccggattcgtggactgaattccgatctccagctggatcagtcccggacgcagcgaagcgatcagattcaattcttcttcatttaacagatcagctgccacttcaaagtgaaaattcgtttttccccggtcatgttctttcaaataggtccagattgccatagaatgactgtgtttacaattgaaggtacggtctacaaatttcacttgaggcacttcatgatcaataaaaaactgcagctctttttttaccagctccaaattgcggaaccggaggcatttatcaatggaagacagacaataactgcaggaaaacggacatcctcgactggattcatagtaaatgatcttattttgaaaatcctcaatatgatcatacacaaacggcaccttactcagatccatcacagggcggacttcattctgaatacaattttcctctttccggtatacaattccccggatcatactcaaatctttgccttctcccatccagtgttccatcaattccagaaaagtctcttccccttccccgcacatcacaccggtcacctgcggatactgcttcatcacagaaaccgcattgtaagacacttccggtcctccaagccagatctgcgtcccgggcagcactttggagatctcggtgatcagctgctccacatataaaatattccagagataacaggacagacataaaacatccggcctcttcttatagatatccgataaaatatcatccattggctgattgatcgtatattctgcgatctctgtctgctgtgcatactttcccgcataagcacgcaaactgtataccgccagattggaatgtatatattttgcattgatcgctgtcagtaaaactttcataaaaacctccatatccgttgacattttaataaaaaccatgtaaaattatgaaccgtgcagccggggtgttagcggtaccttgtacctgcaatccgctatagcaggggtgatattacgcagagggtgcagcattgcatagctgccctcggaaagtggcgttgagatttgggtcctacgcgacgggaatctgtgaaccgtgtcaggtcgggaacgaagcagcactaagcagaacctctcgggtgccgtaggggtgcctgggttgagttaactaccgaggtaacgtatggggtgatgcattcgaagcgtaatgcacgaatgattttccgcaaaacaggaagtttgagttattcagacttcttttttttgtctttctgtttctgacgcaactccttaaaaaactgtttcatcatcccactgcactcttcttccagcacgcccgttgtcaattccacctgatgattgaactctttcatatcaagaagattcaggatggaaccggcacagcctgcctttggattcatacacccgactaccacacgtttgatccgcgcctgcacgattgctccggaacacatctgacagggctccagcgtcacatacatggtgcagtcttccagtctccagtcattcatctttttgctcgcctttcggattgcctgcagctctgcatgcgccagtgtattcttatccacagtccttctgttgtatccacgcccgatgatcttatcctggtacacgatcacgcacccaatgggcacttcttccagagcatacgctttttttgcctgccggattgcttcccgcatatatttttcatcttgattcatatcgtttcctctttctcattcctcactgatcggattcggttctttttttttgtgtattgaatacattagaagaaagacaagatctgaggtatactatgacacccggtatctattatttctatgaatatcaaacagacaaaaaaatccgaaccgtaggatttctaaaattaacacagacttttcctgactgtcagattcagatctccatacggcagattcctgtcacctcacaggaaaaactgccactctccatgctcatttttcaacacggtcggatctacaaaaaaacagtagctgacttgccttccaaaaaccaatgtatctcctgccgtgtaaaactgtcagctgaagactttcctcccgatctgacctgtaccgacctctatggattccttgtggaaaccccggggggaaagtactttattgccggaacagacacccagcccttttctacagcgcttttgaccgactggacaacatccgttccacttcttgaaacagagccagcgccatcacaaccggaccctgtcatcgaaccggaaccagaagaagagactccatcggttctggcagaggagacatcttacgtgtcatccccctgcccgtgtatacgcaaactgtgctatgaagaactctcttccctgcaaaaaccgttctggagacttgccaacaatagttttcttctgcatggatgccataattatcatcaccttctcctattagaagaagaaggccatcagtggctgggagttcccggtatctattctccacgggaagcacgggctgctgaattgtttggatttccacaattcacaaaggattatcataaacaactgaatctctcagaagaggaatgcagtccggacaaagactttggctactggtgccgctgtcttaaatgatcccgttcatatcctgatacagacgttttgcataactgtctgtcatcccgcacacatagtctgtcacaagcagcaggcggagatacagcttctctgcctcgctttttccttctgcctgataactataggcttttttataattatctgaaataaaagacagtactcgactgtcaattgcattgagctctctgtccgtatcatagtataaaacagcctggatcatacgatccatcagaaaatccaggattactgcttcttttacttccatgcggtaaatctctctggaagagaatacatagcgataggctatatcgcccaaacactccatcaatttttcgccaaacgtatcataaaagagatctttttgaaatgtccctgccataatctctgtataatgctccacgaaccctttcgttgcacaatcaatcaaaaatccctgtgcacggatgatccagttcttgatggcataggcttccggattctgaacccctttctcaattcctctctggtgcagttctttcagcttccgaactccgtcaaatccggaatctgaatatcgctcagttaaacaggtcaattcttctttaaatgtgtgataagaaagaaagcctttcacaaaggcgtcttcaatatctgctgttttataggccagatcgtctgcggcttccagaatataggtcagaggatgacggcagtttcccgttccggtctctctggtaatctcctgaaaaatcttctcgtctgccagataatatcccatctttttttccttgatattaccggaatccgggttcacctgtgtagatgaaaccggatattttatgatcgtattgagcagcgcataggtcaggttcattccatactcatccaccagataatgcagccttgtcaccaggcggagggcctgagcatttccttcgaaatgatagaaatcttctttcatttgcaggtttaacatctcatccaggctatgccctttataatacaactgtggcagttttctcacaaaccagtcccggattgccagttccccaaaatgaccgaacggcggattcccaatatcatggatcagtcccgcacattccagaatatgagagatatcttctttcatctttcgggtaaacgcctgatccgcatcactttccaggattgcttctccaatattctgtccaagagatttggcaagggaagatacttccagggaatgcgtcagtctcgtccgtacaaaatcactctgatccagaggaaacacctgggttttatcctgtagcctccgaaaagatgcgcttcctatgattcgatgatagtccttttcaaactcactgcggaaatcggatcttctctcatctgttctctttccggatccacgcatccgcttttcagacaataaggttttccattccataggcaacctcctttaatccagataaaccggtggaacatattcccttccaagcattgctttttttctctcttgctctcctaaaaatgcccactctgtcatatctttccatttatgtgtccgtctgtcatacacctgcacatatccaatcctgctcggatgcattctcacactgtttgactgatactcatgtcctgtgtatggattcacatcaccgacagaaagatcctctctcttcgcatcttcctcttccgcacgcttcatcaccgaagaaattggaatatcttttacaagatccgtaattgcacgctcgtgttttgcgtcttcctcatgaggctttaattcctccagagggagttcgatctgcatctcttccagcgtcggctctccatcttctaattttccttcctttctgcgcatctcctccactgtacgcagatctgcaggagtcagttctgcagattctcctcccagaatactcaattgaaacggacaatccaggatcgatgcaatcatccgcatatcctgttcctgaaaattatctcttcccagtcgctgcgtcagattctgtctggacattttcattccggttttttcttctatgatctctgcaagttcttttatggtcattccctttcggctcaatacaactttgacctgttctccaaatgtaagatcttccatacgcttcctccttttcgcatttttacatccattaagaaatatttttatttcctacagttcaacttctctcattttagcaaatccatttttatgcgtcaatcgcaaagcccgtttttattgctggaaagaaaagagtttctatcccaatccatggaataaaaactcttttttctaggactgtatctgtgccagatactcttccaatgtaattccttttttcatgatctcttttgcagcttcttcccctacataacggtagtgccatggttcataaatgtactgtgtcacatccgtcttatctttcggatagcgcagaataaatccataattctggcaattcttcaacaaccactgctgttcttttgtctgtgcctgtgactcatccaaagtctggttctcctccgatgtgatatccagcgccaatcctgtagcatgttcgctcgttccgggaactgccaccgattttcttgtctcatcataagaatctaaataggaatacccctggctaagccatgtctgcattgtatcattaaaaacattcttctgatcatcataagagcgatatccagaaatcactttcagcttcattcctgccttttcagcgtcctgaagcatcttattcacagattccacaattctcgcatcaacttgattgccctcatcatcaattcccgtcaattccggtgcgaaatctgccgcaagcggataagagctattgacaagaagcagattccattccttagactgaagattttgtgtcttttctgctttcttttcttcctctaattgttgttttaaggttttcacctgtttttcatattttgccttttgcgttttcatctcatcatttttgtcatgcattttactgtttgctgccagaaatgtgagtaaaatccccgccgctgctcccatgatcatccctgtgatcaatattcttttcgcttttcgatttactcttgccatatctctcttaactccatttgtattttagaatctatctctgcgttgtttgaacagactgcaatccgataaggaaatccatccagaggatactcacaataataataatcctcatcaaactcctctggcttttttatcaacttgggcggatccgacaactgaatttcaaatgaggacatcttcagtgccattccctttctggtggccttcataaaactctctttcaatacccagtacctgcaaaacatctgtgctttttcctcttccgatctgcaccgaaggatctcttcatattcacgcctgcagaaaaatcgttttgccacgtccagtctgtccgaccgtatcttctcaatatcgcatcccagtttcgtacctttctttgcttctgtgtcaattgaacacaatacataatctccacaatgagaaagattgtaaacagcctgtgcggaaatctgatatcgcattcggatttcttccaataacagccatgctcccgcactttgggctctgtctctctgaaacaacaatctttctgctttttcttttctgaatgcagggagtctggcaaaccaccctgtataacactcctcttcatacaaaggtctgatatctgcaatccaggtacgtatcatactcttatcctttcaggtaacggacttcaaatgtatcaatggtaatcggcttattaaacagacttccctgtacacagctgcacccaagctctttcagtacattcagctgatctctcgtctccacaccacttgctgaaactgttacccccagctgacagcaggcatctgccactgcctttgcaacaatccggtttcttctgtttcctacaatatttgctacaatacttttatctattttcaatccatcgaactccatgatcgtcagaatagacaccgtagattctttcgctccgaagtgatccagaatcacacgtacattgctctttctgatcttattgcttgtctcggcaagcatttcctgattcatatcattgtaggattctgaaacttccacctccagatattcgcaggatacatggtacttctcgatcaaagctgccatcttttctgccacatccacctgtcgaagcgttgccccggcaaagttcacagcaatcggtatcataggaagatcttctgtctcccatctgcgaagagtcttgcacacttcttcaaatacatacagatccaggtaatgggacaactttgtctcctccagaagtgtcagatactttccgggattcataattcccagatctttatgatggtagcgcactaccgcttctgctccaatgacttcttctgtatctgcatcaatctttggaaccagacatacaataaaattgccattctcaatatcgctgagcagatcttgcttgatgatgggctcgtgatgtccctttttcagatttttataatacttctgcttttcctcgcgcatcattccttccgcacgactaatcagcttttctgcatcaatatctactttttcccatgcatatccgatcgaaaccagtcccagactgatgttatccagcttatggtgtgcagcattgatattcttaatgaatgtatcatacgtcacatcctccactgccaccaaatattcatctccggtcagacgaaataccaaggagctccggaaatactcttccaatacttctcctacgcgaatcacgacttcatcgccgtattcatgtccaaattcccggttaaaattcttcaatccgttgatgtctacagaaaccgctcccaatgactgatgctttttcttttgtacttctgacatatacctgacaaaactgttccggttcatcagccccgtcagatcatcatgataactcagatattcctgctgcttctgcatcttctgcagaagaatcgactgtgaaatatacggaagaagtgatctcataaaggaaatctcgcatccgcctctgtgaacgctcactgctgccaacacggctgtaacaccatcttccaacgattgagaaacactgtaatctgcctctgtcgtatctgtaatatcctgccggatccagcgcggccactgctctttgtcaagcatcttgatcttatcacgctgccatggcacaaattccgcacaccattcgtagattgtaagaatttcttcttcatctctctcaatgtaatacacatattccgaatcataataatcccggattgtactgagcacatcattcataatttctatgatcgaacgttgtttataattctcactcatagtttctttcccccgatatcatcccgttccgctggatatgaaaccatagaattatctactactcattcatctgcggaaacacatataattattctataataatatgctttaaaatgcaagaaattgtgaatgtatgccatgaccggaactttccttacacaaccggaaaccagaacctgatctccattcctttctgataaacagaaactgcttctatctctattttcagctcccgaccgatctgccgcaccagatacaggcccattcctgtcgattttttctggctgttctctcctgtaaaccctttttcaaaaagatatcgtatctcatacggcttcacaccacagccattatcacaaagtgaaaggcagatcctgttttcttggattctggaatggatttttatctgagcgggagagataccattacttcctatgtattttatagaatttgtaatcacctggctgagcataaagcacaaatttttcttatccgaaagtacaatcttctctttgaaatccatctgtaccaaaacctgcttttcttccagatacacccggtattcccccagcacttccctacagcattcctccagatctgtctcttccagtaaatattctttattgacggattttgttctggcataatacaacatctgttctacataaaactgcatctgtagtctgacatgttccatttttttgtacacaacaggagatatttcttcgcttctgttctcaagcagcaaagtaaaaagggacaatgggagcttcacttcatgtgcccacatttctacatactgctcatattcttctgcctgtatccttccggagtctgcctgttcatatgccttgcgcaggcagactccgatttcatgcaatattctccgttcctcttcccctgctttttcactgacatcccgctcgttttcttcacttggatcctccaggaataaagcaaaacattctgtctttttctgagttttccttgtcttccaaaacaccgcactcaaaaaaataactgcaaaacaacctgattctgctcctgccaatacagcaaactgctccataccggacagccagagaaaaaaagccgacacaagatccgtacacagcagaagcagaaaccatattttttcttctttgatcccattccagatttgtctgatatgttccatattactgttctctcttccaccgatagcctcttccacgcactgtttctatatgcttctccaggtcaaatattttaagtgtttttttcagccttgttatattgacctgaagtgcattttcatcaatatatactgacgttccccacaatgctttggaaatctgttcttttgtcacatccattccattttgttccaaaagaatttttaaaattttcccctgattttccggaatatgacatacctctttgccccgatagatcgtatttgtcctgatatcaaacaaaaaatcgcccccatccatcaaatgcccatttccaattgtccgcttcagcaaattttctgttcttgccagaagtcgatctttatgacacggttttgtcagatattcatccgcccccaactccaacgcttttaactcatcctgcattttatcccgggatgtcaaaacaaggatcggaagcttcccctgttttcgtatttcctgacatagcgataatccactgattcccggaagcccaagatccaataccaacagatccggattttctgctgcacagacagcagccgtctccggaaagtctgtcacacaacatacttcataccctgacttttgatagatatttgccagttcttctctcaaaaattcatcatcttctgcaatcattattttttgcatagttctcctactcctgtcgtcttctccggacaaattttaaaaccctgtggtcactgatctttatcattcccattatataagctgtttccatcaggaacaagagaagaatcacacctgcagcgatccaccaaaatgttatactttcccggctcaggccaaacagccctgccaaagtccgcactccaaagatactgtgcaaaaatgccacacctaacgtcagtccgtaataccaccagatctgaatgctgcacgaatcgcagatttcttcataactgcttcccaatgcgatcaatacgcggtaccgttcttttgttttttcctgctgaatcaggaactgaactccaatcagagtattggcgatgatcaaaaaaataatcgccaaataaatggtaatatatcctgctgccacccgataaaacatctgtcttccggcgctccccaaatagctttcatactgcagatccgttgtctttaaaagatcattgacagacattaccgcttccagcatccctttttcctctctcaaatccggattcaggattccattccagtaagagtagctgccttctgacacaaatgcatcaaaaatctgatccggcacgatcaatccagacatgatcgtcagcatctgatctgccaccagattgtcattgcatactctgggaatgatttcatactccattccttctatctgtacagacatatgctcttccagaagctgttctacattctgcacggtctcatcggacaaaaatccgggatgcccgtagattgccatctgatttttctgtaaattcaacggaaccttcccttttgaccgtaaaatttcattatatccggattctgcaatcaaatacggagattctctccaaaaatcatcacccaatacctgttttgtccgctcctgcagctctttgcagtcatacgcataaattttccggtcatccggcagctctggagcaatatcctgatctgtcaaaagcagaccatttcgaacttcaaataccttcaaaaaatactgatccgccttctgtgcagacaacacctgatctattttttctttgtcttcatcaaatgtaaaatcaacccctgtcatatcctgctcggacagctgtcggcttatgctgattccataagagcagcaaacaatcgcaaacagcatcataagagaggcaactgccagcgaaccagattttaaaaataccgattcctggatctgacgaaatgtgaatgtccagagatttttccctgaaaaccgtctgcatacctcatcaaatacatatgccagtccccgaaaaagacagaaagtccccagaattcccaaaaaacataacagtccactcatcccgaacaatgtccagattctcaattgcggacttaaaataccacacccgattccatatgccgccaccagaaaaagaagacccgaaaccagattcgcgcacgattttttcggagaaaatgtcttctgcctttctggctttgcttcataaagcaaatcgtatacttcctttttccataactttacacaaagcacaagtcgtgccagcagtttaatactcagaaagccaaccaccgtacagatcagcgccggaacagatagggtaaactgatgccgcaaaattccaaaccctgcagcacgggcagttacaagactgatgatctctgaaagtagtaacgcacatggaattccgatcagaagtgcatatccactgtttcgtaaatcctccaaaaacagcatctgaaataaatttctttttttcatccccagcatcagatacgttccgaattcatggcttcgtctttccatctgatatttatctgtaaaataaatcaaaaaatacaataaaaacagagaaactacatacaccatcggaatcaatgccagcagtttatttactgcaacccgttccatttctttcaaaaaaaccatcacatcctgccggtcaagagataaaatgatataaaaagctacaattgcaagtatcatagaaactgcatacaatatattgtctttccaatttcttttactgtttcgtttgatcagctcagagaacatatgaccttcctcctcccaactgcgccaacacagataaaatcctgtcataaaattccagattggtttcctccccgacgcgctttcgtaattcatgaaacacctttccatcctgaacaaataaaattctggagcaaaaacttgctgcctgtgcatcatgcgtcaccatcagcacagcagcctcatcctcacggtttaccccggagagctgttccataaggcttcttgcacttttactgtccaatgcaccggtgggttcatctgcgagtacgatctgcggatgtaacaaaagcgctctggacgccgccactctctgcttctgcccgccggacatttggtccggaaattttttcagcacctcttcaatttcaaaatattctgccagtctccacattcttttgcggctttctttgtctggaattttatggatctgagcaggaagcaggatattctcttctccggtcagatgatccaaaagctcaaactgctgaaacaaatatccaatctgccttccccgataggctgtaagctgagcatctgtgaatgtcccaatatcctttccccgtaagaggatccgcccctttgtcggccttaaaaccgaggcaatgcagtttaacaatgtagttttcccggaaccactgctccccatgattccaagaaattcgccctgatatacctggaatgaaattccccgaagcgcttccgctgcactctccttttgtccataagttttatacaatgattcaatttccaaaataatacggctcataatattcctccctttcttgataagaatattataagccgcatcggaaacaaaaaacacttacactttctgtaagaaacattcgttttcttttatgacaattctaattttcctgtatataactggtagtatgtccctttcattctgatcaggtctgcatggtctccacgctcaatgatctttccatgctccagtacaatgatcgcatcactgttgcgaatcgtggacaatctgtgcgcaatcacaaatacagtacgccccttcatcaggttatccatacctttctgcacaatactctctgtccgggtatcaatgctggaagtcgcttcatccaggatcaataccggaggatttgccactgccgctcttgcaatggataaaagctgtctctgtccctgagaaagctcttctccgtcaccactcaacatcgtatcatatccttttggcagcattttgataaactgatctgcatgtgccagctttgcagcctcgtatacttcctcatctgtggcatctaattttccgtaacggatgttgtccataatggttccggtaaataaatgagtatcctgcagtacaattccaagagaacgtctcagatcatcctttttaatcttggtaatgttgattccatcataccggatcttgccttcctgaatatcatagaagcgattgatcagattggtgatggttgtcttccctgctccggtagatccgacaaatgccagtttctgacccggttttgcaaacaggctgatatcttttaaaatcactttctcttcgttatatccaaatgtcacatcttcaaacctgacatctccggtcaattctgtataagaaacacttccgtctgctgtatgcggatgcttccatgcccacattccggttctttctttacattctacaatgttgccgttctcatcttttcttgcattgaccagagtcacatatccctcgtctgtttccggctcttcatcaatcagagcaaagatccgttctgcacctgcaagcgccatcacaatggagttaaactgctgtgccacctgcataaacggctgtgtaaaactcttggtaaactgcaggtaggatgacagcacacccagtgtaattccaccgattcccataacagaaaggaaacctcccaatactgctgtcagtacaaactgcagatttccaatgtttccgatcacgggtcccatcatattggcaaatgtatttgcctgggatgcactttcaaaaagcgcctcattgagcctgtcaaactcttcctctgattttctctcatgattgaatacttttacaacgcgctgtccgttcatccgttcttctacaaatccggtcacatctgccaaagacctctgctggcgtacaaaatattttccactgttcccaccaatcttttttgtcacaaagagcatcacgccaattacaagtactgccagaattgtaagcagcggactcagcaccaccatggagatgaatgtcacgatgatcgtgaaaaaggacatcaaagcctgtgggatcgactgactgatcatctgccggagcgtatcggtatcgttggtgtaaagactcatgatcgaaccatttgtattctggtcaaaatagcggatcggaagagtctgcatatgttcaaacatatcatctctgaccttctttaaaacaccctgaccaatgtagaccatcagccttgtataaatgaatgtggcaatcactcccatcaaaaagatgcagccaagcacagcaagcgctcgataaagattggcaaaatcaggtgatttctgaccaatcagcggcataataaagtcatcgattaaaaacttcagagacaaggatacggaaatagaggcaaccgcacttaataaaatacagataaacacgatcacaaaccggatcttatatgttcctgttacatactttaacaaacgttttgcagtctgtatgttttctttcgaaactctcggcttcctattcatcctcttcacctccctttatctgtgattcatatacttctctgtaaattgcatttgttttcaataattcttccgaagtaccaactcccatgatttttccttcatccagaacaatgatctgatctgcatcttcaatagaagacactctttgcgcaatgatgatcttcgttgtattcggaatttcctcccgaaatgcttttcggatcagagcatctgtcttggtatccactgcgctggttgaatcatccaggatcaaaattttcggtttcttcaggagtgcacgagcgatacacaaacgctgcttttgtccacctgaaacgttgtttcctccctgaacgatcatggtcttataacctgccggaaattctttcacaaaaccatctgcctgtgccagtttgcagactctctccacttcttcctcactggcatgttcatctccccagcggatgttgtcataaattgttccggtaaaaagcacatttttctgtagtaccatggatacctggtcacgcaatgcctccagattgtactctctgacatctactccgccgactttcacacttccttttgtcacatcatacagtcttgggatcagctgtaccaatgtagattttgcacttccggttccaccgatgattccgatcgtctgaccggatttgatatgaagattgacatctttcaaagaaagatttccgccttctcctgcatagctgaagtccacatgttcaaatcggatgtcaccatctgctacttctgtaactgcctctgctttgtcctgcatttccggcacttcttttaatacttctgtaatacgatctgtagatgcttctgcgatcatgatcataacaaatacaaatgtcaccatagacaaggacatcatgatctggaatgcatatacgatcacactggtcagttctccggttgccattgtcccggccacaatgccttttccaccgattgccaccatcaacaacatcaccgcatatatcgtaaactgcatgaccggtgagttccacgctacaatcttttccgcttttgtaaacagcgtatagacatatttggaaatcccgtggaatttttccacctcgtggtcttctcttacaaatgcttttaccacacgtgctgcattgacattctcctgtacagaattattcagaatatcatattcgtcgaataccttaataaaatgaggatgtgctttctttgcgataaagatcaaagtacctcccagcaacggtatgataatcaaaaacagcaatgcaatttttttgttgatcagaagtgtcatgatccatgacagaacgatcataatcggagctctcgccagaagacgaatgctcatcatgtatgccatctgcacgttcgtaatatctgttgtcatacgtgttaccagaccagatgtggaaaaccggtcaatatttttaaatgaaaattcctgtactttataaaaaatatcatgacgcagattttttgcatacccggcactggcaatcgctgccatctttcctgccaccactccaaaatacaaagcgaccattgccataatgatcaggagcactcccctctggatgatatactttaaatttccttctacaattccaacatcaatgatctttgccatctccatcggaatcaaaacttccatcaaaacctccaggattacaaaaaatggagccaacacagactgttttttgtattcccggactgattttaaaagtgttttattcattgttttcgtcttcctccttattttctgttttgttttctgcaagattttgaatcatccgcaaaagcacctgccgacatgcctttacatcttcttcggatatcccttctaccaggtggctctccgtatccctgatctgctcaaggatctgtggtctgagcgcttctgcttttttcgtcggtacaatccgcttcaaacgggcatctttttcagaactttgtctggaaataaatccgttcttctccataagctgtaaaattcctgtcaccgtagacttacgaatctgaaactcttcttcgatgtctttctgatatacatctctgtgcagcgtttccaataagatatgcttcaacacatgtttctgcatggtggtcaaaccatcatcttccatgggctctgccgcatttctgcgtttcatctgattcgaaagaatatgtatcagtcttccggttggcatgtcctttcctttttcttctatatcctgcatgatccatccctctctttttatatagttagttccctaacttttagtcattatacggaggaaattttttattgtcaagaattttcctgtattttttgcattttaaaagcacctgtccaaacagatgctttctcttttaatttccacattcaatgctgatcgcattgaatttttccaggatatcttccacttttaatgtttgtttttcttcagctgacaagtccatcactgcctctccctgatgcatcatcagaagacgatttccatattctactgcataacgaagattatgtgtcaccatgatcgttgtcaggtttttctgtttcacgatctgatcggtcagttccatgatcagatctgccgtctttggatccagcgccgctgtgtgctcatccaggatcagaaaatcgatcggagtcatggttgacatcagaagcgccatcgcctgacgctgtccaccggagagagaaccgactttcacgttcagcttattttccagtcccaggttcaactggcttaacaactcctgataataagactttctgtttttattgatgccttttcccaatccgtaaaaattacctttattatcggcaagagacatgttttccagaatcgtcatcgatgggcaggtaccaagcgccggattctgatacactcttccaatcttccggtttcttttatactctttcatgtgggaaatatcttctccctgcatcagaatctgtcctgcttctaccggaatgcttccgcacaggatattgagcatggaagtctttccggaaccgttgcttcctaccacggaaacaaaatctccctgttctactgtcagattaaaatcttcaaacagacacatttcattgactgttccaggattgtaatatttatgaatatgttttaactcaagcatttgtcttcaccttctttttccgttccattccaatgagtaagattaccaggaataataccgctgtgatcagcttcatatcctgtggttcaaaaaacttcaaagcaactgccacgcaggctttgtaaacgacagaaccgatcaggactgctgtggttgctttcaaaaatgtcagattcttaaacaggctggttccgatgatcacgcttgccagcccgatcacgatagctcctgtaccactggaaatctcaaatactctctgctcctgacagaaaattccgcctgccatagcaaccattccgttggcgatcgccagtcctaaaatctttacatttccctgatcctttgcaagtgaagttacaagatttgtattatctcccacagctctcagaagaaatccggattttgtctgcagatacagatccagaattattttcacgatcactgcaagaataagtactactacaagaactttatatttcgctgctccgcctgcaaaaattccattcatcgtctgattatcgaaaatattctcttcaccgaagatcggaacattcgctttgcctgcaattctaaggttgatcgtccaaagtgccgtcatcataatgataccggagaggagatctctgacttttcccttgacgtggatcagtcctgtacagactcccgccgctgcccctgccaaaaatgataccggtatggtcaggtacggattcaccccatgagtgatcattgtcgctgtaacagctgcacccagaggaaaacttccatccactgtcagatctggaaaatccagaattttatatgtgatataaaccccgagagcaaggatcccataaatcagtccctgttctaaaattgttacaaaaatatccatctcaatgcctctccgtttctaattcttactttgaaatgctgtcaaatgtctctgctgcactttcaagcagtgtctcatccactgttactccaagatcctctgctgcttttgtattgatataaagtcccggttcagaaatcgtctcatagttcatctccgatgcttttttctctccttttaaaatgtctgctgccatctttcctgtctgttttccaagagctacataatccagaccctccgctgccagacatccaagtttcacctgttcgatctcgcttccgaatactgggattttcttttcatttgctttatccaaaatcgttgccagagaatttacaactgtgttgtctgtcagattggtcagacaatccacttctgtcagaatctcttctgttgccagagaaatatctgcagtctgtgtcactcctttttttacgatctcaaatccgtaatctcctgccagctcctcatatgtttcgattgctgatacagaattgacttcgcttgttgtgtaaagaattccaatcttttctgcatccggaagcatctcacggatcatctccagctgctctttgatcggaagttcatcactggttcctgtgacctctcctaccggagttccatcctcattggcaagctttgctgcttttggatctgtgactgctgtatagattaccggaatttctgtattcattgcagaattataagcagactgtgcactcggagttgcaattccacagatcagatctacatcatctgaaacaaatccgtcactgatctgttttgctgttccctgatcagcagctgcattttcttctttgatttccaggttctttccttcttcaaatccggcttctttgagtccttcgataaatccttcccggcagttatccaaagaaccatgttctgcaaactgcgaaatcccgactgtatatgtttttgtaccgtcctttgccccttcatcttttgttccacatgccatcaggctgactgccattacacttcctaaaataactgcgaatactctctttttcatatttttgttctccttttctattactatattccaaaagcaaaggagccgatcatgtggatacagggtatcggttctgtaatgattgtataaaaaaaccgccccaagctctatgcttgagacggtaataaatacaaattcattatcgcggtaccactcaaattgacaaatgtccactttctcacgtactgacatacgctcctgattgataacgggttcggttcccgacgacgcctactcttttcatttcaggccgccctcgaaagtccattcagaattaaaatccatacagcaatcccaccacctgctgctctctgtgatttcttttaaaacctactcttctttctcatcggttttgcttttgatagtctttattctaacgtccatttctgaatttgtcaagcacttttttaaggtaaagtgatgattgaatgaactgttttggtattattaattctgtcatcctttgataacatcggtagtttcattcctatctccctggaatttccttgtactcccaggtcaaagcggacacagtcttgattttccaccttctctatgctatactaccaagcgttgcaaagcccgcaaaaacaaggtcttatagggcttttcgccgattcccggcgtaaaatgaatcgtgtgttcgtgaccttccacacgtaaaacaaaactaaaggagattctatttatgaaaaaaagaaaaaacaccagtgtactgtttctggtacagtccgcaatgatcgccgccgtctatgtcgttctgaccattgtatttgctccgatcagtttcggacagattcaatttcgcatcgcagaggcgctgaccattctgcccgtatttacttcagctgcaatcccgggattattcgtaggatgtctgatcgggaatattttaggcggagcaattctcccggatattattgtcggaagcattgccactctgctcggtgcagtttttacttatttgttaagaaatcacagcaagtggcttgcccctctgcctccgatccttgcaaacaccatcctgattccatttgttctctattatggatatcagatccttctccccatcccattccagatgctcacggtaggaatcggagaagttctctcatgtggaatacttgggatgattgtttataccgcactgaataaatataaaactgtaatctttcgcaaataaaaaaggaagaagttctttcagagtgatccatgtcctctgaaagtcttcttcccttttttattatttcatatagccgataaatgtatttccactgccggccaccatcgctgtcatctgttccatagaaaccgtatgctcagatgctgtatccggatcaatgtaggtgatatctgtcatactgtatcctgtcaacaagattgcatgatttgcgtccgtcattgcaataacaggaaggcctttattgataatgtacagaacctgttcgatgctgcatccggtcaaatctacttttcctgcattctgtgccgccaaaaattcttcacaagtctgcaatgaagtctttccttctccaattccaaacggcgctgtttccgtatcatagaccaaatcccgatttcctttttcccatacatagtcctgttctgaggaaatgaccacaccggagatctgctcagctttctgaatcgcataagctgccttatcatagattgcaaccagctctcccataccatacacataatacttttcagattctgctttatcatttaatgtgatcgtgatcggctttttccctactacttgcttcggacgaagtattttgggtacaggatctgtgattcccttttcataagtgagcctcatctgtttccctttcaactccgtaataaaaggttccaacgtgatattcttggtcttcttttcttcattgctgctgatataatcctgacttgtcactgtataagtctctccggattttgcaacccgattcaacgtcatcatattctcctcaataaaaacatccgatatataaatctgttctgccgaatatgttttcataacctcttttttggaatttcgtatttccagcttatacattggaaacatctcttcacctgctgccgtatgcccgacatcctcctgacggatatagccatatacgaaatcttcccctatgaatccaagcggccggactgcttcgccctcctttgctgctaccaagtcctctttcccggtctttagattcagcaccttgatctcctgtgcagtattgatcgtcccagatgtctggtatgccatcaaatgtccgtccggagatactgtatactgtccttcttccagattttctcccaatacggtctgctcgtcttttgcaagattgattttataaaaatttcctcctgcaagaatatacaaaagattctgctcctgattgtaatacaccattttcccaagttcttcttctgcgattgcaaatgattttgtacttggaataaatgctttttcctctactacattgttttctgtatcatagtagtaaacatcaactccgacttctccctcatgtgctccccgattcatatatccatataccgcaaatgtagtatttccgttcttttccacactgatgatgcgaatatcatgctgatcgtatctgcttcttacgtcatttccttcaatattactgaaactgaatacttgtgcaagttcattttgttttgcgttgtatgtccacaaatttccattgcgtacaaaagaaactatattccccgatgaatttgtttcatatgaaatatcagaagatgcaactcccatcagtactccattttcatccagcactttctgatttgcatcaaaaatctgctccatctttcggttataatccaacagataaatctccccctgtacatagcggactctgaaaaactcacgaacatcatacgtctcaatttcttcctgatctccggcaaacgtcacctgatattgtgcaagaagagatgtatatacagaattgctctctttgatactccattccggttcttccaccacctgtggatttaaatctccccatgttacatggtctgaatccgaatgaatcgtaactgtctgatacgttgtattatcgccttctgcatttgtttccagatattttttcagctcttcctgactgcccttttccagtgtttttgcatgaaagtcctgtgcaaactccagacattctttcaaggaaagttcctccggcctcgtgattctggtataaaaatgaatctgttcttctcccatggaaaggatcacttccagaacagcttcggaaacttcatccggaatcccggtctgcagatccagcaaaattgtctcttccgaaatgtccttctgctttcccttcagatagatctcctcaccattcaaagagtatactttatattgaacacctgtgatcgtattccctaactcctcaatctgcatcctaagcgttccattttcctccaaaggagtgatcgtatcacgcatggctgtaatatccatttcattgacatatcctgccaatggattcagactttttccttccttctgaaatgaaattctcggaagtgtcggatcacccagatctatgatctgatcatctacgccactattcataaacagactgctgataaaaatagcagccagaaataccacgagaaggattcccgccttttttactccttttttcatgattctttccccttatccaacaatactcccagcattggattaattcctaaaaactccctgcattcccgaatctgactttcactcccctgttttgcctgattcgtctttactgcacgcagcaaaatatttttcggcgtatgctccatatcaataaattctaacacttgtgtttcgtaaccggactgttccagatatttcgcccggataccatctgtcagaagtgccgcaaaccgttcttttaacaaaccatagtccagaatcggcgccagttctttcgatccggctcctgtccgctgaatctgtccgttaagctcatgctgacaacatggaactgacaaaattacttttgcattccagcctactgcctttgcaagcgcaaaatccgttgcagtatcacatgcatgcagtgtcacaaccatatcgacttctttgactccttcatagtctgcgatatcgcctaccagaaattcaagtttgtcatacccatatttgcggcttaattcattgcaatggcgaatcacatcttcttttaaatccaatccgatgatacgtatgtcatactctttgagaatatgaagatagtaatacattgcaaatgtcagatatgactttccacatccaaaatccaggattgtaatctctctgtctttttcaagctttggaaggatgtcctcaataaactccaaaaatcggttaatctgccggaatttatcaaatctggaatgtacgatttttccttcctttgtcataacccctaagtcctgaagaaacggaacccagattccttcctccagaatatatttcttacttttattatgcgataattctatcggttttacactgcctttctgcgcctttttctgaatggttattttcccttttttgctaaccaaaacagtataattcatatgcactgtgaatgcctgcatctgccgaaattcttccatatattccaggagtctgtctcttgcagaaacaggatccagattttcatgaaatgcctgtgttttcgtaaaggattctaactgaaaaaataaactgccttttttttcaatcggacggacctttacttttaaaattccctctttttttctcggattgctcaaaactgcctgaacaaattctatatttaaaatatctgataataattttttgatcgtttccatgcgattccccttatcatttgctttccaatcgtaactgttcaccttcctgcgtataaaatactgtacataaaatctatatgtgaacattaactattgtaaaacaaaatatactctggtgcaataaaaagtcccggacattgtccgggctttcctgttttatgactgttttcatttctgatattttcatatcatcatcactcgcctctgaaaaagcatggatcattctcttttttccttgatcttccaaagcaaaccgttactttaaaaagatctccatccagatatagttccagtgttcctccctgcatctgcaccagacttttggcaatagacaagccgagtccactgccttctgtgcttcttgaaatatccccccggatgaaacgctctgtcaattcatccgctgaaaaattcaatggatactccgaaacatttttcaaagagaatacaacgtcatccttgtcaaaacgcagatccgcataaattcttgttcccggcattgcatattttgcagcattgttatagagattttccagaacccgccacatccttcttccatctacatgaataattgccggttcattcgggagcgtctggatcagttccagatttttcagtgaaaatttttctgcaaactcacctgctgtctgattgatcatctccaccagattcacatccatcatttccagattgatattgccgctgcttactttggatgcctctaccacatcttctgtcagtgtcttcaagcgctgtgcttttgtctctaaaatttccagatacccctgtattttcggatcttctatattagaacgttttagaatatccacataattgatgatcgaagtaagcggtgttttaatatcatgagatacatttgtaatcagatccgtcttcagacgttcactcttcacactcttttctaccgctttttgcagtccgcttccgatatcattgagcatctcagccatttctttgtgttctccacgaagatatttcatagaaatctgatattccagatccccacctgccactgctttgacacctttcgtaagttcatttcttgcaatcgcattcatcaccagataataaacgataagtccatccgctgccagcgtgatcaccacaagcgctgaatttctaaacaatgcaagcatccagtgaatcccgatcaaaaaaagccctgacacgaccatcttccaggatacactgcgatgattccagaatattttgcaaaatctgcacaatacatacaacatactgtttttccacatcgttcctgctttgatcctgcgcaccagactcaaatatccgatcaaaaacaagatcattgtatatgccgctgttcctgtcagtacaataatatcttctacagtcggaatatatcctgatgcatactcgtatgaatatccgatcgttgctgtcatcagatctgccttttctgcaaaatagccaagtgccatatttccattcactaaccagaacatcaccggtatcatccaaataccaattacaaacaccgccgccagctctgtcttccatctgtcaaatacattcaaatggatttcatcatcttttctgtttcttcctgtgatgatcgtcatccagatcagacatacgatcattactaaaatcgaaagaatcaaaaacagagctccactgttaatataaggtgcatactcatcatacatttttttatccagataaaaagaatcctgaatagcaaatgtagaatccaccgctgctgcaaaaatgaaatcactattattattccctctctgcgcttttacaaattctttccagtcattcgctgtgatatccatattggttttaaaatcggaaagttttgactgtacgatcaggtatttggcattattctggatatctgagatgttctccttcacgctgctgtaatcctgatactctttgcgatttgtataaacctgcctggtctctttgtctacataaatatatgcaaaattcgtatttccctccgtccattctccactgctctcataggacttaagatcataataaagactggataaaacacttcgaagctgggtatatacatcacttagctttccattcaactccggtgtatgattgacaacatccagaatgttatttccgccttccggctgcatctcctcttccaaaacaccattgaatccccagaaatcctgatacattattttgtcatcgggtcccaggatcagatgacccgaaatctggttgatactcatattaccggaatacaatgcctctgaaatttcttctgcagtatatccttccatatcaatgaccagctttttctcacgcagaagatttaaaaattcttcccaatagtaataataatatgtcttgtcttctttctggcagacaacaaccggagcagtctcatcaatatattgatgattctgatactcctcactccatgtttccaaatctgaaagtttataccgcactccttgttcttcttcataatttttttcgttgtagccatactgcataatatcgatccatttatccggattgtattttccgtctgtctcaaacaaatcttcataaagaatccgattcagaacttccatcgttgcccggcacatcagattctcaaattccttagaatccgtatattctatcggctttctgttccatatttccctgatattcacagaatatgtggaaacgatcacaaaactgagcagagcaacaaccgctgaaagaaccgaaaaaaagatcaaaaagccttttacaaatgcgctcttataccatttattcatgaaaactcccttctacagtttttcgatcttatatccaactccccacaccactttcaaatatcgtggttcttttggattgatctcaattttctcccggatatgacgaatatgcactgctaccgtattatccgctccgattgcatcttcattccagatggattcataaatctgattgatcgaaaaaactctcccctgattcttcatcaaaagcaataaaatgttatattcaatcggtgtcaggcgcacaatctctccatccactgtcacttctttaagatcatcattgatccgcaaaccgccaacctcataaatcgaatcctgagaactgcttacatttccacccaactgagtatatcggcgaagctgagatttcactctcgctaccaattccaatggattaaacggcttcgtcatataatcatccgctccgatatttaatcctaaaattttgtctgcatcttctgattttgctgacaggataataatcggaatactgttcgtctcccgaatcttcaaagtcgctctgatcccatccaagcgtggcatcataacatctaaaatcaaaagatgtacggtttctgtctccagcatcttcaacgcctgcattccatcatatgcttttagtacctgatacccttcctgtgtcagatatatttcaattgcttctactatctctttatcatcgtcacaaactaaaatacgatacattttcatcacctcccttacagtatacatgatattctcatttttttaagagcacttggggaaaatcttatgaaattattaattcaacagccagacgcatccattccccctgcacattctctttcttttttcatataataaacataagaaactcattcttatatttatatgaaaggactccatatgaaaataaaagggctggatgtcagcgaatttcaaggaaatgtagactgggaaaaagtcagatcagcagggtatcaatttgccatgctacgtgccggttatggttatggcaccattgatccgcaattcaaaagaaatgcttctgaatgtaaccgaatcggacttccgataggcgtctattggttttgctatgcacttacgccggagattgcaattcaggaagcagaaggttgcctgcgtacaatttctaactatcgcctggattatccggtttgttacgatatcgaacaggcttccgcaaactacgctgcacaaaacaacgtaacattcacttccgaatctgccggaaagattgtacagaacttttgcaatcgaattgaaaaagacggttattttgcaatgtattacagcaatcggaattttctcaaaacttatcgtcttctttctctttcttccagatacgcactctggtatgcattttataacagtaaaccggataacacagactgccagatgtggcagttcacaagtcagggcaaaattcccggtatagccggagatgtcgatctggactatgcttttgttgattatccttctattataaaaaaagcaggattgaaccacctgtcacaaaaaccacctattccacaatatatcacttacgtcattcaacccggcgatactctgagtgaaattgcacaacgatttggaacaaccgtttccatactccagacatttaataatattcacaatccaaatctaatctatgccggaaatacactgcggattccaaaatcttgatgtgtttttaagaatttcataagaatttttctatttctttaatagattcaacatactttggacacatttattccgtatactaatactcagatagttgataaacaactatctcccccctcataaagtaacggcatcttggggcgacccaagatgtcacactttactctcattcctttagataactataaaacaacgaaccccgttagccggaaggttagcggggtttcgctgtagataagagctgtttgtattgtccacccattaagcacattataaacgtttttcttgcatcaatatttcaatcgtttttattcctccgattccctcaaaccctggctgataaaaattttttcctctgcattcttccaatttttttccatccgacaaatatccgtcaatttgggaagaaagcgcatacgcgatacaacactcccatataaactcctcatcactacacagcataacatactgatatccattttttttgatcttttctgccgcttgaataatctgttgaatgatttttgcagtttctgatttataaaaaacataagcattctcttgttcaaagtaaaactgatgattgccataactacaatgcagatgaataatatcagtttctttctctatcccgctatttttcattatggatatatcttctctcttcttacctacagataaaatgcactttcgttctttttcaaatgcttgaaaatccttcgtgcttttatcttgattttcgatgccaaataaaatctgcaaagcctttttcagctgctcccttccacttttttcagcaatcatttttttacatacaccttgtttttctttttttattgagtttgtaaattgctctaagttcatctgagattcaggaacattttctttggaatatactttaagagattctatagcaatctgaaaatcttcctctggcaaatactttcttccttttccaaaaaattgctccagaaaccattcacataccttctctcttacatcttttctgtaattatgaggagcatccgaatagtagtactcaaccttattgctctctccataaagttcatatatttccctcaatgccggatactcttcttccggaacattgcaagtccaatcacctgtacaccccgtaatcatcaatggacggggcgctgctaacgcagccaactctacattatttgttccaattctcagacctggagcattctcacactcacagcctccttgcatatgaaaagaaaccatattgacaggagcagcagcttttattctatcatccaccgcggtcagtaagaacgtttgcgtccctcctccggaagcgcctgtacatccgattctggatgaatctacaaatggtaaactttcaagaaaatcaagacatcgtatactattatatagttgcattcccagaagactaatcccatactcttcaaaattcctatttctaaagccatgaggaaactgtaaactttctcctctgccaatcatatcataggtaaatgcaaccattccatttctcgcctggttcatacatctggctggaacatcaacgatttccgttctttcaaatctgtccttatcccaatgcccatggggattcaaaattgcaggcataatcgtacaatgttctttctgataataaaggtttcccgccacgaaaacacctggcatactttcaaagtaaacattttcaattactacgcccctgtatacctgccttcctgtggttacaggcttgatgggaatctttggcagttccgggaaaattccgctggtaacttgaatctgccactttaatttttcagccttttgttcccatttttccaattccttgtacacctgcggtttaaaatgataatctttggatatccgttcctccatttcccaaattccaccctttcttttttccattctactacttgtaaacgccacatttatgtgctgtattatacatcgcaactacattttctacaggagttccatcttctaaaatccttttcataaccttaagcttcattttcgcacgcctgttcataaaatctatatccaccaaatccatgcacaaatctgtaaaatgtttatcaccggcaaaagttacaggtcttgtactatctatttctcttatttttttatctctgccggtaacatccctttcaaactctgtattacttgagcattcgtttaggaatccctaaagttattcttgatacataaaaattgaaattcaattctttaaaaagcggataggtagcggctgcaattaacagcttttaccatccgcttcactatacctgtcgattatatcctggtcactttctcgcaaaatgtatctgcctgagttcttccacatcatcacaaattggatgcagcggacacagatcacaatccaggataatatttttcaaaatgtgatcaaaggcatttgtaatctcatctaccttttttccctgttccatcagttgaccgatcaccggaagctctcgtgtaatgaataaaatctgcacatgtttcacctgaaattcttccttatatctctgaatcatcagattgccgaccgttgcaaaatccaatccttttttgactgcttttttactcactcgaacctgctctttttgatccatgctggacgacagcatcatatacccttccggaataatcttaaattttgcaaattccagctttttgatccgctggtacgctttatcctggtcttcaatcggatctatctgaatccatgtgatcctggtaaacgggacactttttttgatttccggaagatccggtccatataaaaggatctgatcttccgaaatcagttcttttgaagaggtcactgcctgatagcaggtagaaggccgagaacggattcccagttcaaatgccacttctttttggagaagaaattcattctctttcagtaaattccatgattttgcatgatttctgttcaactcttttgccggaaaaggcttcagtaattctcttgtcttctcaataactttatcatatacctgcataactaaatatgatcctctacttttttcgtctcatgataatgaagcaatttgtcatagataaattcaatcagcttggaatccgcattggtcatatagatggtaaacagaactgctgtcactgccgttgcggcaagcagtatttttgtaaaaattctgactgtttttttcatccggatcgccccttccttataagtctaatcctttttgtctcgcatattctgctgccccaagtgctcccatcagctgcggatcgatctttaattctattaccttcatacgcagcactttctcaatcgctgcttttagcccctgattctttgcacatcctccggtcagcgtgattgcatccttcgctcctgctttttttgccattacaaaacaacgttttgcaactgcctgctgaatccctgccgcaatctcattctgtggttttccttctccaaccagcgtaataacctctgattctgcaaatacggtacactgagctgtaattgggatcacattttctgcagtaagactcagtttcgaaaattcttccaaagacatctcaaatgcgttcgccatagattcaaaaaaacggccagtgcctgctgcacatttgtcattcattgcaaatgttttcaccgttccatctgtatcgactgcaatccccttcacatcctgtccaccgatatcaataatcgcccgtaccgacggatctgtcacatgcacacccattgcatgacaactgatctcagaaatgttttcatctgcctgaggcaccttatttcttccatatccggttccgatcaaataggtcagatctgagatttcctttagcccggcatccgcaatcgcctgatccagccctgctttcgcactctgagcactgttgatcttgctcttgatcgtatttgccgcagcgattgccccattctcatccagaatcaccgtttttgtatacgtggaacccacatcacatcccccaaaatatttcatctttttccctccttaccaggtcagttcatcactgtaatccagataggtcggatccagtggttcttctctgaataccgttgacatatatttgttcactgcatcacgcattgcttttctggacacagttcttggatccatcagatcatgctgtacccagatcagatgaatcccccgctctcttgcctgatcttcgaataatccgtgaagtcctccaaaatttttacaggaaacatggtcatacataatcacaatattcgcgttaaatttctcacacattttccaacattcatccaatgcattgacatatccgccattgctgtgcgaacgcatcatcatccgctcgtatgccattgccatatctgtaagtgcttgttctttatctccgatgtgatagaaatgatagctcagcatactttccatatcgaccagtgtacggattccccatgtatgttctacccaggtcgtaaaatgtgtataataatgtgccggacagcaccatacgatcgcacggtatttataatctctcctgtctgcttcccggtccttttcatatcctttgagcatcatctttgtcactttttcatcctgttttgtcataaacggatccagacaggccgcagtctggaattcatattcccgctgcagggacagtgcacttccgatcacctgcggatatggggtacagtttacatcccatttatccagcatacactgcgttgtcttattatattcctctgccttttcccagaatgcatcccagtcccatttcacatggtaagtttcttcaataaaacggatacagtttttcagatcttttactgcataagcatttgtctcaggctcattaaacctctgcggcggggtcaatgtaaagcttggcaattttttcatataacgatccataaacagtgcagcaccaagggaaccgtcacacggcatggaacttgtaataaaagaacttcctacctgcggataatcatccacgatcgcacatccaacttcagcggacggaagaggacacacatcagctgcaagccccatacgctctgctgcatctacatacataatatttgcattctggtccacctctccaggcaggcagaccggtgacatggcgatatcgatccagtccagcatcggaaaacctgccatgataatggatggtgtcatttcatcaaacatgactgtttttgcccgcagctttgctgctcttttattgtttggtgaatttaaattttcatcacgttctatgatcttggcaataacatccaccgaattgtgtactaccccataaaactgttcctgtgtatacctcagctgtttcccgcgcagccccagcttatgccgatccagcatatttgctactgtcagataagaggccatccacgggtaacgcacgaaagatttcgtcagtgccaccggatgctttccaagtgtcaccgccatatatccatataccttcagccaggaagcaaaatcataagctgtatcttttacgcccttccactccctctggttcagagaacggtaaccttctgtataataatctccaagccctttattatgcagtttcactcttggctttgcataatgtttgacatcttttacaattccgggaagtgccttttttaacttctgaatcttcgttctctgtttcattttccggcctcctctctgcgtgctttgattttcttgatttccagactttccacaaaggcctgtactcttgttcgaagctgcccgcttgatttcgcctgatatggccggtcaatcgatagtgttggtatccgatattcctcagaaagaacatgactttgcagtgtcctctcaaaagaccagtaagagcagaatttcatctgctcgtaaataataccgtctgcatgatattcctccaccagcttcgccgcctgatcctgtctatacttaatcttgtttggagtgacatatctcgggcaggacgtctgttcaatattgatccgaacaatctgagtgagtacatcctccgtatcatttaatacaatttcctgacgtcccgggatcgagccgtaacagaaccggtctgcggcaacataagcaccgctgtcttccaccagttcgatcatatccggatcgtcaatttctcctcccacaatcacaactcttgcacggaattttgattttttatccggttctctttgtttgagttcttccagcgtttcatataatttatccaggatcagatccttcggacagacataggtcgccaggacaatcttatgaaattctgcccccgtgatgacaggattttctgcttttcgcatttctcccatttcagaaataatcctgcagatttcattgtgtttctctaccgcttttcgcattgcttcttcggaaatgtccgttccataccgttcatgcaatggctccagtactttccttcgcagctgttccacaacatgctctactgtgatctcctcatcttttcccggaacatctacatagctgataaagaaattgtttttctcttttccctgaatatccagcaattccatgttttcataacaccggttcatacattcacagatatccactcctgcaatggcatccagaaactggaaaccaccttcaattgcccgttccagcaaagctctggaaaattcacaggcactgcttgccagataataggttgcaatttccgtagaacccatatacggcgcccgcagcctgacagaaaaacagttatccagattcagcaggacttccggaatatgaaaacacgtatatcctacagcgattctgttctctttctgtgcctcacgaaccagatcgttataggcattatccagtaatttttcaaaatagatcatatgttttagatctttcataacagccctcctgacacttatggcagaatgccgaacttctgcattgcctcccttacatttgctaccacaggggactctttgggaagttccataatattgcgtccctcaaaatcatacattgccagttttttatctgacggaattgccgccagcagatccagccccttcgtatccagtttttcaatcatagccggatcctctacccgattcacaataagtccaatacgatcatattttaccagttccattgcaacattctcgatcgtcttgatcacttccagcccttttttgctagtatctgatataagaagcagatgggtcactttttccataacacggcgattgatctgctcaatacccgcttccccgtcaatgaccacataatcaaactgctccgaaatcattgtgatcacatcttttagataagaattgatacgacaataacatccggctgactccggacgtccgatcgcaagaaacgcaaatccttctttttctacaattgcctctgcaatcttatatctggactcagacaacaattccattgcttcttttgtatttccgtcttctacattcgcaacaatttcatttcggatgtcatcaagtgtcaattctggttggattcccaatgccgtcgccagaccgatcgccggatctgcatcaatggcaagaatctttttttccggaaatccctccactagaagttttacgagggctgcggaaatagaagtttttcccacacccccttttccggtcaatgcaataatttttgtctctctgctcataccgtttttcctttcctttaaatccgcaccgcaaggtgatatgcaccgcgcaccgcttccagtactcttcccgcacggctgctgtcaccgatgttgtacatttcttttgccagatgttcttcccctgcttcgaagaaaaaggtctcatccgcttttccgcccattgccagcacgatcagatctgccggaatctttttctcaacaatctcttccttgatcgtcttctccatcggattcggaatattcggaggaagcagtggctgccaggtattataagggtccggcacggtagaagactgattctgttctacataaacaccatctttggcaagtgctttgactttcgtacagttaaacagctgcacccctgctttttccagataatgcagtaaatgtcctctatttgcagtgcagactcccgtcataaaatgcggcatcatttccagaaccgtcacatgttttccatattcattcgccagccagtgcgccgtctcacagcctaccactccaccgcctacgatcacgatattttctgcaccttctgccttttccggatgctccaaaagctccgttccaaggatcagattcgcctcttccctgccttcaaacggagggaaaatttcctttgttccatacgcaaaaataacggaatcatatgctttttctttcaaaagttctgttgtcacagttgtattcctatgtacttccagctgataccgctcctgacagagctccacctgcttttcaagatatgcaagataattgcgcaggtcgaacttaatcttcggaatgcttccaactgcaatctttccgcctaatttctctgatttttcatacaacgtgacatggtgtccccgttttgctgcgatcagtgcaaaggtaactccggccgggcctcctcctacaacggcaatctgtttctttttctcagccggtgtaaaggactcaggaaatcgttcttcaaaaccggttcttggattcacggcacactgtggatgaccacccaggataaactcgttaacgcagccttcctgacagccgatacacggtctgatttcttctacattccctgcaaatgccttgctgcaccaatccggatctgcgagcagcggtcttgcaagcatcaccatatcgcagtctccatcccggattgctttctctgcaatatccggataccccagttttccgactgcaacaaccggcacatctactccggcattggatttgatattatttctgcggaaaaattccttcgcgattctggacatatcaaggaagcagccagcaggcattccctccggcggatgcggcagccaccagttatcatagcagcccagatccacatcaaatatatccactcccgcacgcaccagtttcgccatataatgcaaagtatctttgatcgttcttccatttctgaattttttcagactgcccacttcattcatacgttcctgataagtctcattcagcgccaatgacaaatcgatccgatacatgatcgggaaagaatctcctgctctttttcggatctcacgaatgatatccaatccaaacatttcacagtctttgtagcgccccatctgtcttctgttaaatgcaggatttgtcatctgctccagtaaatatccttcatgtccgtgcaaataaatcccatccagtcccatctctttggcatcggctgctgcctgtccgcagtttttcacaatttttttcaaatttgcatccgtcagcggaatgcatgggagctgtggaatataaaagcttggatttatggatgcggacaccggaatctgatgttttgtcatcacacaagtcggtggtcctactcttccaagtcccggtgtaatctgaataaagattttacttccatacgcatgtactccctgtgcaagatctctccaacctgcaaacacagttcttgcatgatcaatccggggaaacaaagacaaatcatctacttctgttacggtcggatcaattccatgactgaccgggatcaatcccgttgtcaaaagccccgttcctcctttggcacgcgcaaaaaagtattggagcattttatcattcggccgacctgactcttcacacatattcagattccccatagggcccattactacacgattcttgatcatcgtcttattgatctgaatcggagaaaacagggctttatacggataaagctcctttgtcatcgccccggaactcaatctgcaattctccttttcttgtttcacccaatccccatacgtttcttccagtttgactaatttttcatcgtatctcaatatttctgcacctcctgttttacgacctcttctaaccaaactaattttaagcattttgcactaaaatcatatttttattatatcatttcaagttaaaatacacaatgtctaaaaacaaaatacagaacaattaagggactcaaaaagctgcttttgcttttcagtccctttctgttatttttgaatcatctccatatatggcagcacttcatatcctgcttttttatacacatggattgctctttcattctccggttccacttccaaacgcaataccgcatccggatacttttcttttatgtatcgaaaaaaatgactcccgattccaaaacctctgctttccgatttcatataaaggtcttcaatccagatacagggtttcccaaactcggtagaaaaactttttgccgccatcgcataccccagtactttcccttctttctcaaatatatatccttccagatatggatttttctctacacaattgcagatatccttttcaaagatttcttcggatccgttactttgaactgcatccgatgcataaaacacccgcatcatctgtaaaacttcctgtctgtcctgttccatcatacttctaatcgtaacttccattgctgcccatccttttccttattccgccaatatactcttatgccgcttcaaatatttcccgtcaccttttctgcccaggaactgattgtccttcacgatcacccgtcccctctgcatgaccatttcaatttctccttttactgtcattccctcataacaggtataatctacagcactgtgcatatcctcctgtgtcaaaatccgctctttttcaggattcaaaaagaccagatctgcatccgaaccaggcaggatcgtccctttctgcggatacagcccatacatcctgctcggattggtacacagataatgtaccatctgcggcaatgtaatccgccccttcatcacgccttcggaaaataaaacccgcagccgctcttccactcccggtgctccattcggacaggcagtaaaatcttttgcccccgcctgcttttctttgctgtaatgaaacggacaatgatcggtcgccactgtatcgatcaccccatcctttaatgcctgccacaacgcttcctgatcttcttgttttcgaagaggcggtgacatgatcgctttcagcccctccttcggatcctgatacatgtcatccgtcaacgtaagatattgtgtacaggtctcaactgcaaaatgcttctgatgtgctgcccgcgctttcataacttccatcagcccctctttgctggataaatgtacaatataaagaggagcatcccctgccattgccgccagatgcagcagccggtctacagcttctgcctcacaccgggccggtctgctaagtggatgatatctggcttctgtacatcctgattcccgatacattttccgaagataattgatcaccccgtcattctcacaatgcactgcaattacaattccatctttctttgcctctttcagtacctgaaaaatctcatcatcggtcagcatatcatcatatgtcgtatacactttaaaacttgtaattccgtcattttcggcaatctctttcatctcttgaagaacggtttcatccacatgctggatcactccatgaaatccataatcaatcactgcctttccttcggccagacggtgatactcttccacctgatgccacagactgcatccctttggaccaaacgccatatgatccacaatcgttgtcgtccctccacatgccgctgccactgttccatcataaaaatcatctactgctcggtacggacctgcctgcagatccatatgtgtatgtacatccacaccccctgggatcacatatctgcccgtggcatcgatcacctctgctcctgcttcttccaaatctgttcctacggactttattttctcatcttcaatcagaatatccccctgaaatacctgtgagtctgtcgcaatcatcccattttttactaataatttcataggtttcctccttttttccggcatttccatcattttattgatatttatagaatactcttatcatcccttgaattcaacctgattttctaaaatattttcagatatctaaatttcttttagctctctcttttttatgatataataactgcacaacacacacatctcagacgcagaaaagcgcttaggaaagggtaagactatgggatattctttagatttattaaaacaaatcgcacacgggattgcacagcaatttggtgattcctgtgaaatcgtgatccacgatatacgccacgggattgaaaacaccatcttatatattgaaaacgggcatgtcacggatcggaaatccggtgacagcgcatccaatgttgtattggaggccatgaaagcggagccctctgctttaaaggatcaatatgcatatcttacaaaaacaaacgacggccggctgctgaagtcttcgaccttttatatcaaagacgaatccggaacgcccgcctatattttctcgatcaattatgatattaccgcattggctgctgctgaccagtttttacaaggcttgattcagacgcaaaatccatcctcttccaacacggacagcacagccccccaaatcacacacaatgtctctgaacttctagattccctgatcgaacaggcaatggccagcatcggaaaaccagctgcattgatgacaaaagacgaaaagatcaaagttgttcagtacttaaataatgccggagcatttctgatcaccaaatcaggggataaagtagcttctgtccttggaatttcaaaatttacattatataactatatggatgccggcaaataaaaagaaccgctgaaagctctctcactttcagcggttcctcttatgctgtactcataacttactctgcatccactcatacagatcttgatatacctgctttcgatctgtttcattcaaaatctcatgtcggtctccggcatacaatcgcaaggtcacatcctgaattcctgccgcccggtatttctcataaatcttccggacgccttttccgaatccaccaaccggatcatccgaaccagataccataaaaataggcaatgtcttcggaatcatataaatactctcccgtttctgtgtctgctgaattccactgaacatgtgatagtatgcattcacagtaaacataaatgagcacaatggatccgcaacatactggtctaacttttctatatcgcttgtcacccagtcagctcttgtccttgcaggcttaaatttcttgcagaacgggccgttcaccatcttgtctaccagcttgcttcgataatgccagccttttaaggctgccagtatcctgcataagtctttcccgcactttaactcgaacttattctgttctgacatcgttcccatgatgatcgcaccactgagtccattgccgtacatctgaatgtactgacgcagcagagaagatcccatactgtgccccagcataaaataggggacatccggatattttttcatcgttttctgtctcaatgtatgcagatctccaaggacgcatgcgtttccatacttttcgtgaaaaaatccatattctgatttgctctgtactgattttccgtgtcccagatgatcatttcccacaacataaaagcctttatcgcagagatattctgcaaattctgaatatctgtcaacatactctaccattccgtgactcaactgcaaaacagctttcacttgtccttccggtttccattcaattgtgtgaatctctgtatttccatcctttgacggaaaataaaattcatctttcatctttctctctacctgtcatctaattttatatattcccgatgcggagccagcggcttatatgccggacggataatcttatccgcattcttcagctcctccagacggtgtgcactccatcctacgatacgcgcagctgcaaaaatcggtgtatacagtgacggcggaagatccagcatactgtacaccagaccgctgtaaaagtctacattcgcactgacgcctttgtagatcttacgtttctcggcaattacctccggagccatatgctctactttttcataaagtgcatactctgcctcacagcctttctcctttgcaagctgcttgacaaatgcacggaacacatctgcacgaggatcggaaaccgaataaaccgcatgtcccattccgtagataagtcctttcttgtcaaaggccttcttgtccagtaatgcctccagatacagacggatctgttcttcatctgcccagtctgtaagggtagccttcatatcttcaaacatctgtgtcacttttacattcgcaccaccatgctttggtcctttcagagatgccatagctgctgtgatcgtagaatatgtatctgtaccggaagacgtcactacatgcgtcgtaaaggtagagttgttaccaccgccgtgatccatatgaagtacaagtgccatatccagaatctctgcctcaagcgctgtatactgcctgtcttcccgaagcatcatcaggatattctctgccgcagacagttccggacgaggagcataaatataaagatcctgcccccttctgtaattgtatgcatgataagcatataccataaacatcggaaactgactgatcagattcaggcactgacgcagtacattcggaatggaaatatcatcggccttgttatcatatgtatacatactcagaatataacgggaaatattattcatcatgtcactgctcggagctttcatgatcacatctctcacaaagttcggaggcaatgtacggcgctctgcgatcatcccgcgaaaatcatccagctgcgtcttggtaggaagttctccgaagagcagaagatacgttgtttcctcaaatccaggatgtcctgcctttaaaaatccgccgatcagctctttaatattatatccacggtagtagaggcttccttcacatggaacttctttgccgtctacgatctttgtgtttacgatatcggaaatattcgtcagacctgccagtacaccttttccgtttaaatcacgaagacctctttttacttcatatttcgtatacaactctttatcgatagctgtattggtttcgcagatatgtgccagttcctgaatcttaggtgtattctcaaaaatgatgttctcaatgtctctctgcatataacctctccttccgtcttttgctttatatttctttattatactaaagatttatctcctatacaatgaactgtatataaaatatttatgaactattgctatttatctgtctatgatctgtgtacagtagaaaatacatcatttttatacatagaaaacgatttattacttgctgtgctcgcttaaaacagtgaaatagttggaaagttccgcaaattcttccagagtcagggcttctccacgaatacttggacctctgcccagatgttcgatcgctgcttcaatctgctcttttgtaaaatccagttccggcgaattcttcaggccatttgccagagtctttcttctctggttgaaagatgcacgaatgatccggaacatcagtttttcatcctttacctgtaccggcggttcttcatatctgtcaagacggataaccgctgatccaaccttcggacgcggcataaaacagttcggcggtacattcgctacaatatacggttttgcataatactgaaccgcaagtgacagtgctccgtaatccttggttcccggtcccacctgcatccggtctgcaacctctttctgaaccataacggtaatgctcttcattggaacatgattttcaaacaatcccataatgatcggcgttgtaatataatatggaagatttgccaccactttaattggctttccgtcattttctctttttgccagttcagcaatatccaccttcaggacatcttcattgatcacctgcacattatcatagccatccagtgtatcctcaagaatcgggatcaatgctttgtcaatctcaactgcagctacctttcctgcagcgcatgccagatactgtgtcatggttccgattcccggtccgatttccagtacaaaatcatcctttgtgatttctgcggatccaatgatcttatccagtacatgcgtatctatcaaaaaattctgcccgaattttttctgaaatacaaaattatatttttggagcaccgcaattgtattctgcggatttccaagtgttggttctttcatctgcacacctcttctctttctctacttttctaatcgatacagctttcttgcattttctgttgtctgtcttacaacctcttcgtaagaaatcccctttaatgcagcaatctcttctgccacatagaccagattcagggaactgttgcgctttccacgattcggaacaggcgccagatatggactgtccgtttcaagcaccagagactccaaaggaattttttcgactacttcttttaatttttttgcatttttaaatgtaacaacaccgccgattccaagataaaatcccatgttcacgtattctttcgcctgttccagagaataggaaaaacaatggatcaccccatccagccctttggcatactgcttcatgatctccatcgtatctgccgccgcttcgcggctgtgtatgatcacgggaagatccagctgtcttgcaagctccaactgccggataaaccattttttctgtaaatcccgcttctctttatcccagtaataatcaagcccgatctctccgaccgcaactatcttttctccggtaagcagcctttccattcgctgcatcttctcctcgtccaattctcccacttcatccggatgtactccgatcgcaccatatatgaaaggatattgctctgtcaactgtccgatcttatcccaggatgcaatatctgaaccagcatccacgatcatccctactccttgttcctgcatagaacctagtaattctgctctgtcttcttcaaactgtctatcatcataatgtgcatgtgtatcaaaaatcatctgcatttaacctcttttcgcggatatacggaaaaaggagagaacccgtcttactttctctccttttccttcaccgttttctatttaaaataataccatactgaaaaaaaatgttcaatgctgttctctacaacaccacatcatccactttttcaaaattatccaaccgatatgactccactgtcgcctctgtcaccagataaaatcgctcgcctgcatacaaacctctcacttctgaatatccgctcaactttttctcaaatacacaggtaaatcctttttctttatcataggaataaatgtagtactcctgctgctcctgatatcccgggaatccgatcagattcttctcaacatccacaaatgctgcccggtaattataagacacatctgtagagtaacattcctccagcactgtcttatgaacttcttctacatttttcggatctgaaatgtcaaacatggacaacttcactccattgacggttgctccatcttcttctacatccattccgattccaagaagcagtccttctccgtacggatgcagataatctgagaatcccggaatcttgagttctcctaatactctcggcttcttcggatccgacaaatctacggagaagagtggatccacctgtttgtatgtcacaaaataacaggtatcccccataaatcttgcagaatacaccttctcgccttccgccagattttccagttttccaatctctttcaaatcctgatctaaaatatacagcgcgttggaagaatcctccacctgactgcttgcatcactggcactgtcaattcgaagcaatggattcacgcctccagatgtatcgtcattttcccggatcgttgtcacaactctgagaaatccatcgtactcatcaatgctgaacgaatcattgatcactccatcgatcactgcatgtcctgttccatccagttttccatctttataagagactttccggatatccgtctgtgttactctggaaacctttgcatcgtaaatcgtatcatacacataaatattgttctgactcacatagcactgactgccgtctccgaaaaatgccagatgatcggtctgctttgtcggatctttcagactgaaagaagtcaccacggtatagactcttcctttttcctgctgcggaagtaaaatataattactttctatcaattttccctgtacttccggtacataactgctgatatcgtcctgtaaaccggtcacatctgcataaaatgtactgagcagatacatataatcccctgatacacgcattgtatggaaacttccgctctgcgacatctcacccaatgatttcggatttgccggatcactcacatcaaacgtctccgctaccgtatatggcacacttcgaatcactccctggctgtctgtcttatccgttgttcttgcatacacacacaccagtttgtcatcttttaaataaatctcaatcagataatctgtttgatccatggaaatcataccaacttccttcatctcttctgattcaatatttaagatttgaacccgatccatactcataatatacagatatcttccgtccgtcttcacaatatcaccttcaccgacaccttctgttcgcacattggtatccgaatgagcgactgcctgatcggcggccgccttctcttcggaataaagagcagccccgtctgccattcccgcatcatacctcgctgtatcctcatctgccgccgcctggacatactcgtagatctgctcataatcttttgcacttgccaatgacaaaactgccccggtcgctgtatctctggtttcttcggtcacttcctgcgcttttttctctccaacaatgccacgaccagaaagcgcggctgctcccactaccagacaacagcatgctgccgccgctatcattccatacaccggtgtccttttcttctttttctgtgccagtttcttctctatattttcaggctttaaagaatccggcacttcaatatcttctgctgaccgcataatcttatctttgatttcttcttctgtaaactgtctgtctcttttattttccatcacgatacctccacttcctgaagaactgtccgcattttctctaacgccctcttttttctggaacgaacggttgtcggattcatcttgagcatctgtccaatctcatcactttgatagcctccaaataccgaaaatgaaacaatcagacgttcttcctcatccagattccagaatgcacgttttacatcctgcgaaacagaataatcggattcctccgccggataatcctcatccagctcataggcttgtcttcgcttttggaactggctcttacaatgattactcaaaatggtaaagatccagcttctaaaagactcctcttttttcaaaccggatatcttttcataggctgccatcactgtatcactgactgcatcttccgcttcctgcggatgcttcagcgtatacaaagcaaatctataaagctctacatagattctggaatacaactctgaaaatgccttgatatccccacgctttgcacgctgtatcagaactgcttccgcacttttttgataattgtacatccgcatcccctctctttctttttcgtttatcctgctgttcacaccattacttgtctgtcatatataagagtctctcaaatgatgttttgttgcatggaaaataaaaaaatcaggaagatttttatttctccctgatttttcatttgtctggttcttatcctctatagtaattgatcagacatccttttaaaatgatctctctctctgcgtctgtcagatcacccagataaaactctacttctttcaactcgtctcctacgacataagccttgatcacatctgctttttctgccacagcatctcttacatctggaataaagatgtaatcatcattcttaaaggaaagtgctttgtcatcttcctttgtcaaaagcggcagcattccccagttgatcaggttcgagcggtaacgttttgttgcatactcattggcaatattcgcccatccacccaatactttctggcaggatgcagcctgttcacgagcggaaccatctcctggttttactgcaaaaatcgtacttccaactcccagatttccttctccgacctgagggaactgcttctggattttttccattacaggttttaactcttccaatacttccagaggacacttacctgcttcaatcgctttctgtgcagcctgtacttcttttgcacgtcccacataagcaggatcttttctggaaagtgcaaactctgccaatcccagcgggtttgaacgataagaggatgtctcaccggatgggatcaattcatccgttgtggtaaccgggtcatggatctcagatactactttgagtaccagattctgtggaagcgctgacatttccggccagtccttgatatttggtccaaacttgatctctacgcccggatctgccacacctttgctgtcgaagacgcggtttgcgtaaatattctgatcaaaatgatatttctgtcccttgtactcgacatccattgctgtcgccggtgtcaggaatcctttgtttgccgccgttgccgcgattgaacgggcatccatcagtgcaacagaagaaatctgaccgttctggagcttggaaccttctctgttcgggaagtttcttgttgtatgacggatagagaatgcattatttgcaggagtatctccagcgccaaagcatggtccgcagaatgcagtctttacaactgttcctgcttccatcagatctgcgattgctccatttttcacaagttccatataaatcggtgtacttgccggatatacgctgaatgtaaactcatccgcaccgatatttcttccttttataatatccgctgctgcacagatattttcaaatccaccacctgcacatcccgcgatgattccctgatcaacatagagttttccgttcacgatcttgctctgaagagaataatccactgctccgtccagactgatcagagcttttttctccacttcatggaggatatctgccagatttgcattcacttcatcaatcgtatatacattgcttgggtggaacggcatcgcgatcattggcttgatctcgctcatattgacataaaccattccatcatagtaagtcactgctcccggattcagctccttgtatccctcgcttcttccatggatctcatagaattcctggatcttttcatctgttttccagatggaagacagacaagttgtctctgttgtcataacatcgattccgattcggtaatctgcgctcagttttgaaactccaggtccaacaaactccatgactttgttatttacatagccatttgcaaatgtggctccaataattgccagtgcaacgtcctgtgggccgactccttttgccggttctccatccagatagattccgatcacttctggtttcttgatgtcatatgtcttattcaaaagctgttttacaagctccggtccgccttctcccattgccatggttcccaatgctccgtagcgggtatggctgtcagaaccaaggatcatcttgccgcactctgcaagaacctctcttgcaaactgatggatgactgcctgatgaggcggaacatacacaccaccgtactttttcgcacaggtaagcccaaacatatggtcatcctcattgatcgttccaccaactgcacagagactgttatgacagtttgtcaaaacatacggtaccggaaatttttccagtccggaagctcttgccgtctgaataattcccacaaacgtaatatcgtgggatgtcaatttatcaaatttaatctgcaggcgttccatattgcctgaagtattatgactgtccaggattccataggcaatcgtattctttgcagcctcttctttcgagacaggaagtgacacatttcccgtatcttccaggatttctgtgccgtttaacaagtacacaccgttatcatataatttaatcatggtaacctcctttgtctttccaataatttcactaactgtttatcattttagcatgttaaagagggaattgcaaaaaaattctgcgggattatcttgtctcccgcagaatttttacaacttccagtctggtctccccgaccgtgatcacatcttctttctggatcacgattggcttatgaatctgttttccattcaaatatgtatggttttttgaaccttcatctctcaagtacagcttatccccacttcggatgatcgcgcagtgtacctttgatactcttaaatcttccggcagggacaaaaacttgtcatactctgacgatgcactgacccttccgattcccagcgaatcataaaaaataaaactatactgatcctgctgatccacatcttccagaatgatcttccagcgtctcttcgccggggcagaagatgtacggcgttctgcctgttctctcaccggacgacgtctcggttctggttcataatcatcctcttcctcctcatcatcttcttcgtcatcatagtcgtcatcataatcataatcatcttcagaatgatatctccgttgaaactgattataatcttttttctcttttaataattttgaaatcgtaaagaagattactgctatgatcgctgcgatcaatattccgataattacccaatacaacataattcctatcaactcctctgaaggtatcttactatactttcagaatgagggcaagcgaaagacgaagaaaatttatcttgttcgatccactctactgcgcaaaaggaacccacggacagcgttttgcaatatcctgattatatgcttccagatttttcatctgttctgcaatatgaggcacattcatccgttccacaagaacctgaattgtttcttttccttcttccgccagttctttgcgtctttcttctgtaggaattgacggtgtactcatgtggtctttcggatttccaaaataatatccgatcgaaccactttgataggccaatgcgaatacatcatcaaactccgcacagctctgcttctcctgatgctcatattttgtagtcagcggtacatcttccaatctgcccagcatatcataagcgcccaccgtaattgcatggaatgtatctgcagatttaaaaacatcctgtccatttctcatcagctgcatgatcatatccatatacaggatcggagttcctgttttatccataaaatctcttaccatcggactcactgtcatatgtgccggaccatgtgcactgatataaatctgtcttttaaatccctgacgcaaaaggctttccgcaattcctgtcagataacgaatcccttcctgaatgctgacctgaaccgttcctcttccacttgcagtcgctcctgcataaaaatatggaaggccagttaatacaagcccgtcacatgcctccgccattttaagtgcaaacgcttcactgactacggtttccgaatccagaggaaatcccccgtgcatttccacagttccgaccggaacgatcacaatatcatttcgtgtaagatattcttccacttcatcattcaacatcttcggtataattcttgttctcatttttcacctttcctcttataactgaaatatctttttggcattctcaaaacaaattttccggtaggcctgtgcagatagttttccttcctgatactgtctgtccagccattctcccaatggaaataccatatccgtattcaccatatctgtaccaaacatcagacgatcctgaaattcttccaaaaattgtaaaccaaacttttcatctctcataatagcacatccgccactgtttgcagacagatctgcgtataagttttcataatttctcataagacagaccaatctgccgccttccttgacaggacctctgccccattccattcgagatttcagatccggcttcgcatcctgactgatttcatgccagaacggctgactgtgccctatgaattttaatctgggatatttttccaaagcttcttccagcatcggcagtcctggttcatcgacaatgccatattcatatccctcctgcggactcatatgaaacaggattggcattcccagtttttccgccgcctgaaatacagcctgaacaaacggatggtttatttttctgcagatcataaattcaccaatccctgccgctccctgcctttgatattccctgagcctctcttcaatggtttcttcacaattttcatccagattacacatccatacatatttttcaggaaatcttctgaccagctctctgcatttctggtttccggagacagaagccattgctccttctgtctccccggatgacataataaccgctttttcaatctgaagctcttccagatgagcaagcatttcttcgcctgttgatatcctgaatttttctgttcccggaaccggatctaacgctgcatgtaaatgaatatctatttttttcatagcttactcagcctcattttctgtactttattttgcctttaattctgcatacatctgttctgtagtctctttattcaaattaaagatcagccctactccaatcaactctaaagcgcaagttaccactggaatgatattgaccaggaaataaattccattcactgcttccgctgtctgcacgacattagaaccggaaacaaatccgattgctgccaatccgaaagaaactcctgtagaagcaatcgtagaacctatttttctgctgaatgtatataaagaatacatcgagccatcgcttctttcatgaaatttccattcgctgtaatccagacagtctgtaacaagcgcccagatcaacattgtaaatactgtctgtccgatcgttcccaatacaaccaatgccgaatacacatatacatttttgatttccatgacaaccggaatgacactaaagatcgtactggaaataatggctgccatcaaggttgctttttttccgaacttcgctaccagcttcggaaccaatgggaaacagatcaccagaatcggaatggttgcaagactgataatagacatgacatctgttcttgcatagtactctttaaaaatgtagcttcttacctggtttgatccggtaataaagagcatacttcctaatgttgctaccataaccccgatcaatggtctgttatgtacagttgcttttaatacttttccataattaaatttctctgctttttcaacattctgtcgaatacgctcctgtgtcaaattgagcagaacaaaatagctgataatacttaaaacaccgaagacaactgcgatcaaagtaaaacgctccggaagaatattgctctgcttgtcaaagcagacaaccggaacgatggaaagtcctacgattcccacgattgttccaccgatacttcttgctctggaaagcttacttctctgaatcggatcatcacttacgacactggccatcgcaccaaatggcatagaagttcctgtatagctcattccatacagaacatatgcaaatgctacataagcatgaagtgcaataccttccaacggaacatttaaaaagcaaagcacaccggataacgccagtggaatcataaaaatcttgatccatggtttgaatttatctccggactttccgatcatccaacgatccggaaaagatcccatgatcgggtcattgatcgcatcccataatcgggctaccaagaataacgttcccatccatcctgcgctgattcccaatacactggtacagaaaatcagaaaatatgcatctacaaataaatttacaaagcttcccgccatgtctccaaatacatacccaatttcatccttcaccccgaaagggcgaatttgttttttgttcatcctgcttgtcctcttttctttttcttttcaattcacgtgatttgtgttatcctaattataaattataataattgcaatttatattgcaaatttatcaaattacattgcaaatctgacatttgattttatcgttttatattatttgcacaaaaatatgagaggatttttatgaaacttcacgaagctaaattattattaaatgaccccacattttccatcgattccattacttatcaggaattagaaatggacagcgactatgtggatgtacatgaagatatcagttactcgaaagacaatgtagatttacacagccatacgttttttgaaattttattttgtcaaagtggttctttacaatatatggtcggcaatacccgttatcagctggttaagaattccattgtgtgtattcctcccggtgtcagccactgccccctttatctggaacagctttcagagccttaccgcagaactgtgatgtgggtcagcaataaaatctatcagcaatatataaaccttttgaacaatgatccaatcgaaaaatcgctctgtttactgccgcaaaatgtattccttctctccggaaatattctatatcaggtagaagaactttatgaaaagatgttaaacatccctcctgatttttcgggtgcagaactctataagattggtttgtctgcgcaaatcgttactttatttcatcaatttttaaattctcatgaaataaatcctctaaggccggaaaaaaccattcttttggacgagatcatttgctttatagaaactcatctttccgaagaattaagtgcgaaacggatcgcagcgcactttctggtcagtgagtcttctatcaatcaattgttcagtaaacagatccgtttgagcctttaccgatatattacacagcgccgtctgatcgaagctaaaaatttaatttccagccagacaccattaaaaaaattacctgaactctgtgggttttctgattactctgttttctacaaagcttttacaaagcaatatggaatttctccaaaagaatataaaaacagaatttttaaaacacagcagtaaagaagcctccggccagggaaagattctttccccgccggaggcttttatagttgtctaattaattttgcgaaatccgaaaattacagtctcttcaacagctcttctctttctgcttcaaatcctggttttccaagaagtgcgaacatatttttcttatagctttcaacacctggctgattgaatggattcacaccaagcagatatccgctgattccacatgcaaattcaaagaagtagaacagctgtcccagataatattcattctgttccggaatgttcacaagaagattcggtacattcccatctgtatgtgcaaggattgttccattcattgcactcttattgatgaaatcaaccgtctttcctgccagatagttcagtccgtccagatctacaggctcttcattgatcacgatctcttctctggatgtctccacattcatcacagtctcaaacagaattctgtttccatcctgaataaactgacccatggagtgcaggtctgttgtaagatctacagatgccgggaaaatacctttctgatcttttccttcgctctctccataaagttgtttccaccactcagatacatagtgaaggcttggttcatagtttgccaaaacttcgatggtctttccttttctcagtaagatattacggattgcggcatactgaagcgctccgttctcagcaaaatcattctccaaagcttcttttctccctgctgctgcaccttccatcagcttctcgatatccgcaccgcttactgcgatcggaagcagaccaactgctgtcagtacagaaaaacgtccgccaacatcatccggtactacaaatgtctcgtatccctcttctgttgcaaggttcttcaatgcaccttttgctttgtcagttgttgcgtaaattctctttgctgcttcttcttttccgtatttcttttccagaatctctttaaatacacggaaggcaatggccggctcagttgttgttcctgatttggagatcatgttgatcgaaaaatctctgtctcccaccacgtcgatcaaatgtttgatatatgtactgctaatgctgtttcctacatagtagatctcaggagattttctgatctctttcgatactacatttgcaaaagaatgtcctaaaaattcaatcgcagctcttgctccaagataagatcctccgattccgatcacaagaagcacttcggagtctttgcgaatcttctctgctgctttctgaatccgtgcaaactcttctttatcataatcaaccggaagatcgatccatccaagaaagtcatttccggctccgctctttgccacaagcttgtcctttgcctgtgccacaagctcgctcatatatgccatttcatgttcctgaacaaaaccagctgcttttgaataatcaaatgttactttgttagccatcgtttatccttcctctctaacttctctactttattggacaaagtccgcccatccagcatccattccagaatgcccgaacaggtatcatttacaagctcattttatcaaatctgactttgttaggcaaggaattcttccaaaatctgacgaatcgcatcttctttgagcgccggctcttcctgcttttccttttctgtttcttgcttgaccgccttctccagttcttttgaaaatttcttcggttcttcttcgatattaattgaaagttcgctatcttgctgcttcaccacagctgccgctctctgagacgctttctgcgcaccggataatttctgtggctctgcagcttctgaacggatcacttccagatttttttcattttttcgcattcgcttgcagcgatgtgcacatacattttcgagatagtctaccatataattttctgccgcctcgattttataggattcatcagaaagctgactgatcacaaacagagcgatcatctctgcagctccaagagcaccgtactggtacacctgctcgcaaaaaccatgtgtcataaaatgccccacagctccgatcgctgccagaattcccgcaaaccagatcgcctggatctgaatctgtctccacgtatgtattttcagcaaaaatccccgatactcataaatgtatttttccacaaatgcattcacattctcgaccctgtcatgtaccatacatgcatgttcgtattttgcacggacgagtttcatcaatttgtgtgtactctttgacatactccctgctgcacttaccagcttgcgcaaagtcacataattcatgacctttgcaaaaatcccgacaactcctactcccagcatcagataaaatatgatgcccgtctccgttactacttctttccacatagttaaacctcctgtttctggtcttttcacaattccttcgattgtgtgcctgtggacattatagaacaagtcttgtacagatgcccgaaaaaccgttctacagaattctacatctccagaacttcccgctgtctttttttctgctttcttctcttgctcctgcattctttcacacttctttttccctttattttcaagggctctccagaaaaagaagttatccacagtctccttgcatcttgtgtcgtttttccacaaaaattctcgaatcctgacatacgaaagtggataaaactccctatggaattttgaaaacaggtctgttataatttttttgacaaaacataaaagaatttcaagatttggaggttttactatgcattacaaaccaaccggagtctgttctcagaacattgaatttgatattgaagatcataaagtaaaaaatgtacactttactggaggatgcaacggcaatcttcagggaatcgcgcgtcttgtcgaagggatggacgttgacgaagtcattgaccggattgaagggatccgctgtggctttaaggcaacttcctgtccggatcagcttgcaaaagcattaaaaacagcaatcggcagatagtctccgattgctgttttttgatgtccttctgattgtttttacgatatccctgagtggttgaagcagccgtcatcagcatatacgttcattgtggtgttttcgtacaggctcttattttttattgatagttgctctaaatgccatgacggctgcttcaaccactcaacgatctttcctatggcaaaagtagctgtgtcctatttgatcataatgccatcggtaaaggagtatgtactttcatatggatattccatacccgcgaaatgatccgcacgcacccgataatagtaccccggctctaccgtgatatacttcgcagtacttacaaaatagtcattctccgcatcttctctccacgcatcgatctgtccccatgcatctttgtcttccatatattgatccacatatacgatcgtagagacaagatttaccgtccgattcgcagttgtcccggaatatacatagatcctatttcgccccgcttttgtgatggagcactcacccagcatgatatactgtccttttgcattctcattctggcttgtcccggaagcgctctcctgcatcgtaagatacgaaccatctaccttctttgtctgctcctccgatgcctgcacttctgctgcagacactgccatgacgcttcccagcaacaccgccatacacaggacagacactagtttttttcctatcttcatataccttctcctttccccctccatttaagtaaacaatcgaatcagaaaaaactgacgcctttttctaataaaattctaaattttttaaaattttttcaaattcttcctttgacacaattccacgcagctgataatgtactccataatcctcaaattctgcaacaaatcgatgcttctcataaccatcgacccgatattcggtcacccggatctctttcttaccattctcaacagtaaattcatccacgatctcatctgtctctttctgtccaagggaagaatcttcggcattgagataaatggaataccagatcacctccccctgatactcgtaaaagatttgtgcttttttttgcactttatctgttgcatacttttcgagtatcatttgctttggtttataccgcagcctcacaacctgaattcccaactctttttctatctcccgatagacctgtgtctcatctgcactgtcactggaatgtatatccatatcttccacattgatcacagaaacctgctcttcctccccggcaaacttctcaatgatctcctttaaataggacttgctgccaaccgccgtcacgctggttgctacaactgcgatcatcaatatagccgctgccaccatcatgcggcttctgaacaacggattatgtcggtatcgtttctttttcttttgtccttgtgacttttcatatgcctgtatctgctctgccagtcgtttttccatctctgcagagacttcaatcccttctaattcgggatcttccagaatctcttttttgatctcggctgcctctttttctatctcttcatgaagtgaaagcatattcttttttttcatcattctaccccttacatgattctattcgtggttcctacttttatcttgacatttcactaaataaggttaatatgaaattatatgttttcctcggctattttcgttacagccgattaactaacacattttttctggaggtttttatatgaaacgaatcatacttaccgggggtggaaccgccggtcatgttacccccaatatcgctctgattccgcgtcttttggaattaggatacgatattcagtatattggctcttatcagggaattgaaaaagagctcatcgagccatttggtatcccttatcacgggatctcctccggcaaactgcgccgctatttcagcgttcagaactttacagaccctttccgcgtattgaaaggatttggtgaggccaaaaagctgatcaaagaactgcagccggatatcatcttttccaaaggcggctttgtatccgttccggtcgttcttgccggcaaacacaataaagttccaacaatcattcacgagtcggatatgactccaggacttgccaataaaattgccattccatctgcaactaaagtatgctgtaactttccggagacattggaacacctgcccaaagacaaagctgtattgacaggctctccgatccgtcaggaattattatccggaaatcggatcgctgctctggatctgtgtcatttttctgctgataagccggttattctcgtcatcggcggaagtcttggatccattgctgtgaacaacgccgtacgtctggctctcccggaacttctggaacacttccagattgttcacctctgcggaaaaggcaaagtagatgaatccttaaaatccatgcaaggctacacacagttcgaatatatcaaggatgagcttcgcgatatctttgcccttgcagacattgtaatttcccgggccggtgcgaatgcaatctgtgagcttctcgccttaagaaaaccaaatctgctgatcccgctttcagccaatgcaagccgcggagaccagattttaaacgcccgttcttttgaacgccaaggatttagtatggttctcgaagaagaagaactcacaaaagaatctcttctggaagccgtacagaagctgtatcaaaaccgcagtcagttcatggatgcaatgcgtgattcaaatcagcagaactctatcgatacaatcatcaatctgatagagacttcacgaaagtagtcgtgtttcagcaccaaaaccagtcgaacaggtgtcaaaatgacacctgttcgtttacagttccagaaattcctcatactctacatcatactttttcctgatccattttctggctcggtagagtaaactgtgcagcacttctaggctcattcccattctttctgcaacatcagactgcggaatttctaaatagtatacataacgtattgcataataccaacgtggattatatcgatacaaggctacaaaaatctcttcatgcagcttctttctgtccgcattctgcaaaaattctatatatgtatcttctgcgctgtcttccaaatccggaatcaccggatcttctcccgtttctgacaaaacctctttttctgccttcttgttgtaattcaacgcaagatgttttgccgtcgtatacagccacgcttcaatattgatatcttccaatttgtcaatatacatatacaattgcagaaacgtactctgagtaatatcttctgcaatcgtgtaattccctgaatatttatatgctgccttcataacgagatttttatatttttcgtatatctcatcataatcttgtttatccgtcaacatgttttctccagtaattacttcaatttattcagaatctctgccttatctgcgtctgtcaattctcccatcttccatccaagaccaacctggtccccttcataacgcggtatcaaatgcatatgaaaatggaataccgtctgtcctgccggttcttcattgttctgaacaatattatatccatcacagccaagaacgtctttcatcttacaaatcatctttttggccagtaccagcgcttttgatgccagtgcatcgtccagatcatataagttacggtagtgttctttcggtataatcagcgcatgcccctttgacgccggactcaaatccaaaatgacacgaaaatccgcatcttcataaattgttgctgaaggaatttcgcccgatgccagtttgcaaaaaatacaatcattatctttcatatctaagcatctccttttttgtttacttgtagtataaaacatttttccaaaaaatagaagattattttacttacatgaatcgccttttttgtcgaattttgtcggatttattttattgaacccttcttttttgcgtgatagactacacttaaacaaaatacttaggaggacaaatctatgctatctaatattgatatcaacaaaatgaatactttgatgagtaacaatgacgatgcgcggcaaatcatcccgcagcttttacgcaatcaccggagtaccatttctacgatctcacatgagcttcgcaacccgcttactcttgtttcttcggctctgcaggtaatggaaaaacaaaatccggaattgaaagatatccctcactggaatcaggtcgtacatgatatggattttatcattcaacttttagaagagctttccgcctttaacagaagcaatgaattatattattccgtcttctctatggaacagcttttgaaaaatattgccatctccttcgcaatctccatggacacaagtgatgcggatattgaattttcttcttccatctcagattccctcggtgaatttaccggagataagattaaattacagcaggtgatcctgaatttgctgaagaatgcagaagaagccatcacagagcatggttctatccatctgtctgccgtaagaaatcatgatgccgtcatcatcacctgcacagataccggatgtggaattactccggaacaaatggattgtatctttcagccattcgtcacttacaaaccaggaggaaccggtcttggacttgctttttcccgcaaaattgcagaagcccacgaaggaactctcactgcggtctccactccacaggaatctaccacatttactcttacgcttcctgtctagcagtgcttcttttacgatacaacaatactgctgctaagaatccgcagatcagaccacctacatgtgcagcattgtccactccggcgctggtaaagccgacatacaaactgaacaacaccataaacagcattcctcgtttcgtcagccttcccactcgccccttattgcgtatcacaacccacaggagtgctccgagcagcccaaaaatcgcaccggatgcacctgctgataccgcaagactgccagtccagaaatctgaagcaagagacaacagatttgctccgatcccactcacaaaataaatcagcaaaaatttaaatctgccggtttccggctccagattccatcccaatgcccccagcatcaccatattgttcatcagatgatcgattccgaaatgcagaaaaatgcaagatatcaatcgataatactgactgtcttcaaaaatcaatggcggatacatcgctccatatttcaccataaacactgcattttctgtgtctcccaaaaatgacagtaaaaaaaagattcccatattgatcacgatcagcatcactgtacagactgcctgtttattcctctgcaatttgaatccctctttccagcacctttcaccggcacaatttgataccattattataagtgagcagattcgtcttgtccatctgtttccagtatcagatcatcccagcttccccattttcccagacgtcctctgccgattctattcgctgcttttttccatgcattccacacaccgccggattcccggattacttctgtatcctttgtaagttcatattcctcttcttcatccagcgtaaatacagaatctaaaacttcttcctcgtccatctctgcatcctctgtctcatcattctccttatattcccgcataattgcatccagatcataattttcctgaagtgttgctttgtgtaactcataagcaagtgtaattccctgctcatcttcgtaatccagtttttccacaaaatattctgtcatccgatgaaatgagctgcaaagctcctgtttggatcccggcagataacaaaagaaatacttctgctttctgcaaaaaacatattccggttccaacagcagacatccgggatttaacatatatcgctgcagttgtgcaacagtctctaaaaggcaagaaacaaactgttcgatatcctctttttggacctgcttattttcaaacaacactgccatagaaacaagcccattgatctcatatgtatatctgctctccccatcaatcccacatccactcacttccaaaattccgggaatactgttttcccgcagcatgggcatctgataatcttcctcataaatctccgatacataaatatgcagacaaattctgtttaattctttttcatagtttatattcacttccaacttctcctcatttgattgtttccacctttttctttaaacgaatctttttttccggatgagggatctttgcctgtctcattacccggatccgcattctcccccgtgatgcctgaattgtgattttcgcctgatcttttgttgtctggacagccacttctggcacagaaaaataaatcagttttccagacagcctttcccggcaaaaagcctctgcatccgctgtttctcctttcggattccgcattgtctgaactgctgccgtcaaagtttcataagccattccattcaaaatacttttatcatgataataaaatgttgtccgaacaatcatcagaaatacaagaaaaacaagtggcatcacatatgccatttcaacggttgtacttccctttgcgtatttcatttatattcctccctgccatacaatgactgtatatgcagccagcaaaaacgggacaaacgggaaagacacccctttataaatccctttccggattaaaatatatcctgcaaacagcgctgccagaacatgcgcccataccagcagaccgagtacattccaaaatcccagatacatgcctgccactgtgatcatcaaactgtctccatatccaaacgcttcttctgtcaccttactgattcccacaaacaccattcctacaagcgcacctgcaatcataagcataatagaatgtttctcagaaaagaatccaaatcctgctgccagaagcccgcccactgcaataagccacagcggtatttctcttttcctgatatcccagacagaaacaacacataaatatcccccaaaacaaagttttcctatttcgtacatctggaacatcctcctcttcctatgatttttgatttctgaactgcataaatcgtcctgctcaatccactgcacataagcgagttatgataccttcctcccgtatttgtaatgtacactcctgccattgcacttccatggacacatttctcacacttataatatcttcccccatcttcattcctgattccgccaagctctgcatatggaataaaccttacagaaagctgcagatacgtacactgataatcttcatgataaacaagaccattcttcgtaatataaacaatctgctcctcttccgattccatcccccttttctcaaatccgttccaattgctgaatttcatttcttctttgtattttgcagataaatttccaaactgcaaaaaaggaaggcgtatcccataccgcacaacaatatgcagttcatttccattccgatcacaataagagcccgcgcattgtattcctctgcttcctccgtttacaatactactttccaaacgatctgcaccaatgcttcttacaatttctgcttccagtttcgacgtgttcagcaccggaacaagcgctgtatcctctatacatattttggctgcatgcacggctgctgaataaatagttctctgaacattgcaaatttcaataaaataaatcagacaaacgactgcaaaaaagaaaatgggtacgctaagcgctgcttctatcgtaatgcttcctcccgcccccggcacagatgcccgttttcgattatttctggatggtttttgatttgattgtgtcatcatgtttcctttctttaaaatttgtgagtatctctgccagaggggacatttcggcagcagattcgggcacctgtgccgggggcgtgaagtttctattcatatccgaagtacatcggaaactcatatgacaatccatgcctgatctgtatacagttttgcagtcttatttttgtcacacatgcgtctgctcgaaagaaagcaagacctttttcgaaaatcaggttttgttccacacgatccagggtacgcaaagtcattgtatctgcattttctaagaacaacagcatcctcagataatttttgtaattccatccatctgtaatatctgccccttcctgtgtatcttcactggttcccagcttcatcaaagatgtaagcgacaactgccagttttctgctgtttttataagtgccgcccgttttcctgacatcaaagaccgcagatccataatactttccccaaatgcccaggcagccaagatcacctgtttcaccaccggctccagcatcggaagtgccgctgccgctgtaagtgccagagccattgtccccgcctccgattgtttcgcagcatctgtctgcaaatacacaaaattgattcccatacgaatcaaaagcagcttattcagtacagcttccagattctcctgatccgtttcttttccttcaagaagatattccacctcgtaatcaagagatctgccttctttctcctgcttggatgcacttccaaatttctgcagtatatactcatgaaacagcagtttcttagtcatctcatccatatcgcttctcactggaaatgttcccctgccgactcgcagtgttcgtgaagatacttgttcactggcggaaatctgcttgccggatacctccttctcttttggaaacacaagacggatcagccctgactttttcaactgttctatatggggaatcggattattctccatcggaagcgaactctgattttcatttaacaccatatccagatcttccagattctgactgctctcatcttttatctcttctccttttatttcctgttccttccacttttcggccaactcccccaactcccggatcatggaaatcccatagagatcctccatgtattttacaaccccctcacgaaatgcctgtccattttgatctgtaaggaattgaactgcagacatttccgtccgcacttctgatgctccgtaataatggattctgtccagaatctgcttttctgtaaagttcccggtttcatagcttccttctattgcaaatacaccatactcgtctaataattctttctgatattctccaaatgcagaataaactgcccgatctacatccagtctcgcctgatttttctctgtctgaactgacgcgctttccagaattgccgttataaaggagatcatcaacacaaaaagcagacttaaaaatgctgtgatctcccctttaggcgtcttagattcctgcactttcacttgtgatcttttcaaaaatatcatttaccagggttgtcagctgtgttttaaagatcaataccaatgcaataataaccaccataaatctaaccccatgtctgtaacctctcttaaatactggcattaacactttccacataccatccacattgttttttctctgcttctaccctgtggttcattgtttctttatattcttataattttaacttacacaaaacaagagagcagaaactctctgctcccttgttttatataagttttattatctaccactaattatctgctttaactcttcattttctgccttaactctcttcaattcattttcaagtctttcattcgtgccaagcaattctttattctgttttttaagctttgtaatcgcaattttaagatttgcgactttttcttctagcaccatatcaaaaattgcttttttaggattataacattctccttgttgtaactgagcagattttacagcattcttaacttccttatttttataaaaaaagctatttgaaaacccagtatatcttaccagggctgctactgttacccgttctttcctctccaacattttttgaatttcattctttacaatttctgcattttgtttgccttgttgacgattcattgccacaaccttatcgtacttcataacgttctccttaaataccccctctacttgtatctttaataattatatcactgtaacttcatgacctctatctttctttgaagctctttattcatagctgataattcttgcttctctgatttcaactttattacttgcaaattgacttttcttaacttttcctgtaaattctcaatttctatcacactatcaagatttgtttttagcatacattgttgcctatatcttgcatcctccagcatccttctaacatctttatttctatagaaaatggcttttgataactttgtttttctcataagttgagcagtagtaatccattccccttctctcagcatttcctctattgccccaaatgctattttcgtatactgctttgatcgttctttacttatctctacaatcttatcgtatttcatatcagataccttttctttcaattacaatctataattttttcagcatagaaagctctttctttttaatcctgccttttagtttctccacttgaaccttaagttcctctatctgacctcgcaattcctcgttttcctgagacaaacttcggttcctgaccttatattccatgatttccatctgcagtacttcggtgttgtcattctttgaatctttactcccactccaaattctacgacaggatacattgggcgattgcacagctgcatccaacctgcttctcacttctggatttttataaaagaaacctcttgataagccagtttttttcaccagcagagttaccgatggatattcccccctttctatcagctgttctatagccatcgtggccagcttaattttctgctcactttcgatccgattcacagctatcatcttttcataattcatatccatcccatccttttattatatccattattataaggtccattttttctctggtttttctcgtttcatcagccataactttattcccgattctccggtagtggtggacactctgtaatgttttatgtccaagtagtcttgctatcatccaatcctcgatatgaagctcggtcaattttttcccataacagtgtctaaaaatatgtgtcccgaattttagcagttccccattatcatcccgtatatctttctgacgaatcatcctcataacttgtgcctggatcattccatattgatatggtttcgagggatcatccttttttacaaaaatatattctgtttccccgtaacgctctttggtatattccatggcttttaaaattaagcgccccacctcattactaactgccttttcataagtaatggattttacttgatcaatccggacaaaatatctcccttctttctctctaaggcaatccattcttaaagtaagtgtatcggaaatgcgtgttcccaaaagctggtgaacgatcaatgctctggctatctgctcgtccagattaaaaatgtgggaatttaatcgcttaattgtggcatctgaataaaatttaaactgatatcgtggtgtacttggaaaatcattatttaagaaaagttccagaagatgccttctctcatatatattccccacatcttcaatcacacgttttaagccatacagatcggaacgataattctttctttccgttgtctccgtttgtaagtatatcaaatagtcttcaatatcttctcggctcaattcctgcaatgattccagctccggctttcttgcctttaaaaagcggctaaatctctttactgcagtcatctctgaatgtattgtcccaagtgcggaatattttaaatgtaagaatatgactctttttacctcttctctgatatccggctgtaaaatatcggtgaagttaagggtcttcacattttttatgggatttcttctgattggaaattcaaatttttccaactcccatatatctttttcttgttcttcccgttcatctttcacttcagcaaattttagaatctgacgcagttttctttccaatgctggtgtttctctggctgttatatcgtaagcagcccggtatttcatgctggacaaggccaatcccttttccaacatccacccctttaaaattctgacagtcttttctggatcagcattctgcaatactgttatattcttctctatcaaaaacttccgtatattgttataggtggttagttcagtagcaaggctcgataatgctaaagtcttcccccgttcccatataaaggcttctaagatttctttcacttccctggatggcagcccttccagatcaaaataacggatcttacatattctcatagaatttctttgttcttctgaggcatgcttatagctttccatttcgtaaatatgtatcctatcctttttcatgtctatatctccgcttctttggtgtgattgtcaaagcaatattattttctggtttatcaaagtaattatcatttgctttttcaatcttcttaggcatatagtccacatactgtttagtcatttcttctgctacatggccaaggtaatcacgaattgtctgtatcggtacaccatcatcataaaattgggttgccagcgtatgtctgtaatcatgtgttttaaatacatactcacaatctgctattttgtgttttttacattgcgttcgaaaacgttttacaaatgaacctattctatatgctccaccctgttcagcttgaaaaacataatcgtttgcatgaatatgatttttctttatgtattgttgcataacctcatacagcataaatggaataggaatcattttatctgccttcattttaatctgatacactttgatccaggcatcctctccatcccagtagtatgcatctccttttagcgtacatacttcgctgattcttaaccctgttgcccatagatgcaggaagatcaaccgcaattcctctggaaataaattcagtttgtgaagtatttccatataaatatcttcctcaacactcctgtcatggtgtataggatatactttctgctcatagtactccgggtgaaacggaattgccttaatatgtttttttatctttagatactcatagaattttgtgatatccagtatctgccggttcacagtttctgcttgaatttcttgttgctggatttccttaaaatatgcacctatctgtttttcagttgcatcaagagcacatacgtcaggccctaaatactttagaaattttttcacatagttttgctggcttcgaatatttcccatggtcagacctgtgattcctatctgatatcttgcatattcctgtagcagctttctattgtttaaattttctacttggtaaaaagataacctattcaccggattacatggattcactctttctggcgcaaggtggaatctttccatgtaccatacatttgcatgccagtggatctgctttccactcataaagagaatttttcgactgttatccacaatctgcatggagtttttatagttaaccaccttctgctttactatctcttctaatttatcaatctcttcctgttccatggtttctatatctactatcccttgcctgatgcaatattgatacatccactgcataggaagcaggaatcgtactctccgatcctttggatcctttacattctcaagaatatggatgagcagttgaaaaatctgctgtttcatcttttctgaggccttggcactaaagtcccataccaattctgtcttatcacgtaccttatcaaattccatagccagtttctgatctggcagatatggcaggaaaagggtctgctgttcgtatttcaaataaaatttttttgtgtttgcaaattgtttcatttcctgtctgatatgatattgcttcattcgatccaatgtctttaaataccgaagtacctgttctggcttcttttccttcataagatactgctcatatttttctcggatagaataatcgagttctcggatatggtgaattccttcccgaataagaaaatttttgatattacccgttaatggcatttcaattccttcgcactgccgaatttcttccagtagatcaccatattcttgttcgatccagtatgcttttttgtttctgagaaatgatgtcatactatttgctgccctgatcgtacagtccctatcctcaagcagaaaccttttatagttccgaacatcattttcttctactaatatcacattataaattcctaactgcatcagatattcttctgcatatctccatgacttgtcttgtaccggttctcccgttataagctgttcatgcaaataggccaattccgtttgatgctcagtatctagtaatttgattgcaggcacataaccgcctcctcctataacagatgatcaactccatacagggattggtgctggctgtaaaatgcatcacttgcttccatcaattcttcctctgttatattcaaatatttcatagttgtttcaatgtgccgatgaccaagtgcctgactgataagttctagtttccaccctgcctttctcctggtatttgcgaaataatgtcgcagcatatgtggtgtcactttaattccggtctttttttcaagacgctccatcaaactccgtacaccgctgtcctgcattggcttccctgcatattttccagacacattgaccagaagatactcttgttgaaagatcaggtccttatattcttccagataaaactttaagatttcgaatgtcgcatcactgacttttgcctttcggaattctgcattcttggcacgtgcatcattttcattatcttctctaaagtttacatagatcagatggttttcataatcaatatctgttgcatagcgattgcccaaaatttctccgattcggaaacctgtttctgctaataataaaagcaggacttgatcgcggcaatttgtacatgcctttagtaaaataacgatcttgtcctgctctatagttctacctatatgtcctgtttcctttaagtatccgtgaaaacttctccgattcagtatctttcgaattcctacagaatttcttacgatgtattgtgcatcagatagtacttttaaactttgctcgcacccttcctgctgttcagcaaaattatacaatcgaaacacttccttgagatatgcattgcaagtttcattgtatggctttttcgtgtactcatctttgctatgcatcccagcttttaaccatataagaaaatctgtaaaatgttcctgttgcttttcatatttcatattccatacatcttccatcgttaattgattctcagacagatagtttaagtaatatgaaatcacaagagcacttctcttgatggtgtttggcgaacctttcgccctcattttatgcattagatattgggaaggaagaagaacgatttcttggctgacttcttcccgtataaaatagtatttcttagatttttctgtctgcatatccactatgaaatgttccatttcttcacttcctttcctctaacgctatacacagtatacccactctatgctatgaaagctattcacaaataccaacaattccggaaggtttctcctaaaatactcactacatttttctctattttctttggaaaacttagcactaccaacaatttctctacaatctgttacatatagtattcaattcgttttcggttccgaataaaattttctacatctgctattctttctgtgatctgacatactggaagtgcatcaattacctctttgtggtattttcctcctcttcctgctctggaatctaagatagacactacacaagtatctgtttccgtccggattgcccgtccaaatccctggcgtagtttgatctgcatgtctggtacaataatcttctgaatgtactctttcagagtctggtaccgttccctttccgcttctctcacaggatcgggtaccgcaaatggcaaacggacaataatcaaagaagatactacatctcctggaaagtccacgccttcccagcaggaacctgctgcgaaaagcacacaatttttctgtgccttaaattcacggatcactgcctgggaatctttccataccttcagcaacggaaatgggagatttcctctcaattctctgtatacattccccatcatagaataagaggtaaacagtacaagagtatgtccaaatgtggaacataccagctttcgaatctgctcagacaagaaacagatctctccacgataggtatcatacgcttttctctttcgtcttggcatgtatagtaaacaattttcatcataatcgaacggtgaatcagcctgatattttcgtactcttccgacatcttcgagtccgttcagttgctctgacctttgaaaactctcccctgcttttaaagtgccggatgtaaggatggctggaacgccacgctcccaaatatctgcctttatcaaactttctgtttttcgatgaacagtgcaaaacactggcagtccctttgatgtatactctaaaaacaatatattgttccggtccacatttaaaaactgtaacaggacttccctgctctcttccagccggttctttgtccatctggataaattccctatcaacagatcttccgcccgctgcagccagcggatgctgtttcttagtgcctgtctggactccctgttaagaacaaagcgaaaacgtacctgttcttctaatactccctgtggtcttggcaggctttcaaagagctgtgaaaatgcttcccgaagttttgccgcaatatgggtataatgttccccttctaaaagactgcagatttccataaaatcttccggtccgaaagactttccatacatctgccttgctgcttctggaaatttatgtgcttcatcaatgatcagtgcctgataatttcttaataaaggacggaaatcattggctctgtgaagtgtatctgccagtagataattatgattacagatctggataaatactttttcatctgtagcttcttttaaatatttttgataacgacagtacgttctcatctcacaagtttccgggcagtatttggggacgcataccatcctgcggtcaaacccactcagatgctgtacggagtccatgtcatattgttctcttaatgcatataaagcttctctctgcagtgggttttttgcttttcttcgtactgcttccaaccgaagctccaaccgattgtcacatacaaaatgttctttcccttttcggatgactgcttggataggggtagatatgattccttttttcaataaaacctgtgataaaaaaggtatatattctctttggatggcttcctgcaatgcaatgcttgaggttgagattacaataggctgactctgaccgcacatagaaaaatatccagataacaactggctgtattttcggaaaagaatacacgctaccaggtatgcataagtctttcctacccctactgctgcatcgcataatgcaatcttgtttccacacaggctggaaaacatttgatggcaaagtgtgatctgttcttcccgaactttcattcctgcttgcggaagtatttctctgaatatctcttccacctcttcgtgtgccattctccgatattcgttccgatgcatctttccaccctcttatctttatatttgtgttaatatcacatcaatacagccagagacttggttactctggctgcatgtatctgatatcaacagcacacttcgattgattttcttttgttgttggatatcgtatttgtcctctcacttccccgatatcaaatgggcacattatagccggatgtctggcaaaacacccgcacagatattccaaacgtcttactgattacaacgtaaggtttatctatccctgcattcggaccttctggtgtatcattatcatccacccggactcatggcgtcacattcctgcctgaatgcttacagaataaaaggggcgctcttatataaaacgatgatcactgatgccgtccgttgtagtaatagctgaaccatccttttatatcgtcatggcgtttctttctgctacgctccgccggatgggaaagtttctataatgcggatatccaattatcaaggaacagaggaggggaaggcactaagtaccttcccgaaaatgtataggaaaaattcctacttaggagagaacttacctctcctacttactagccaacttacacaacaaaatatgacgctaaaaaaaatatttttttaatttttttcttaagcgtttcattcgtgcagaaaccgtattcgctttcatcccaagcaatttccctatttcctccgtaccataaccaaacgtttttaaaagaataatgtataatgttacttgatccaacttcagcaattcttttcttagtttattgtcatctaaagactttatgaagtcttgcacgttaacaggctgttggatttcccactttccagaaatgtcttctgttctctctataaaatccgtatctggcatctgatgtgtttggtaattacgctcttgtttaaaacacttccagtcgtaatcacggagttctgctataactttttctgaaactcctagttctcgcatttttttctcttcctgttctttccattgtttccatttattttcttcttttgctttgttatatgccatattatttttcctccgatttgaaattattgaaaatcaaatcggaagtggtgggcttctatttcttggattgctccaatagaaaaagacgtactgcagattttctctccacagtaacgccttcttattctgtatcttacttatataagcaaatactatattatagattacaccacatcttaattcgcacttttttaagcactcttccttggcttttcaatgctttcttgtgtctgtatgaaatactagaatttgttttatcattttgtcgtacacatataatcaattaaattttatttctatttttttagttggccctcttttcactttgatataaaatggtcttaaataaaaagcaagcaccctgtttatatttaatacgcacctatttatttttactaatctacaaatattttctttccacttacagttttcgctataagtttacactgccctgaagaatatacaatacgctctaaacgttctgtaagtgttaagtccaactgagtctttatctgcgaatcatctattacaatcgcatcaaattcaaatccttcttcaaagcttcccacttttccaaaaaatgccccgcccccacgtgttgccagaaacagagcctccggcactgtcagcggtctgcattgttcatctacatatctccagtacattttagaaacctgaatagcttttgccatttcttcaaaaattgataaggtttctccgcctgcaacatcacttccaagaccaatcggaatttctttttccatatattttcggataggagcaatgccagacatcaaattcagatttgatttcgggcaatgtgctacaaatacctctcgttccttaagcagttctacttcttcatctgtactggatacacagtgggccataatagaagaatactttccttccaagatgccactttcatcatatgcatctccataacattctgcccaaggacataattcttttacccattctatctcccctctgttctctgataagtgggactgcataggcagatgatactttctctttaattccgcaagatttttcattaactcgtctgtacaggtcggaataaatcttggtgtgataataggttttgtgtttttgaagttcttctgtgcttcttctatgaatcggatagtatcctgcacagattttttcgtactgtcttccatataatattccggagcattgcgatccatattgacttttccaacataggttttaagtcctgtctcttctaacagttccattaaaattcgtgtgctattctcatgaattgttccgaagattactgctcttgtggtggcagaattttttagatcatcaacaaaaattttatatgctttttttgcataatcctcattaccaaactgactttccaccggaaaagtatgtgtgttcagccattcaatcaattcacaatcaaatccaacaccacggaagccatactgggggccatgtacatgaaggtccaccagtccaggcaaaatcaaacggttgccgtaatcaatgatttccaagttctgaaatttctccggaatctctttatagattcctccggaagtcccatctacacaaataccataactgttttcacaaattacaagttcttttttttcattacaatagacaaaattcccttttaaaataaagcttttattcataaaaatatttctcctttatcagatatatattcttgtgtcaatttatgggtttatcctatgacataaataaatattataaaaacatattacaatgattacacacattagcccataaacaatttatcaactatttgactgctgactcttgcattaatcttacgaccgactgcacttccaaggattccacgtaaaatctttccaattaatgtccatggagaagcagtcggaactgtatgggtaaaaatggttatcagtagacttgatatctgagacagcaaaataatatgcagggaattctgtgtctctatttttatttccattgcgaaaaagaagtataacacaaccaaaataatcggcccaccgccaattccaaagaagaacgaaataatgcaaagcaaaagaccattcagcaccatacacacttatttttcaattacgatgtatggattctccttttaaatgtggtatagaatagcaatccaaaagtaataacagcaagtggaacaacctgaacagtcctatcgtattggcatcatcaaataactactttacaaactgaaactctttctttcccacgatactactgataaccgctccaattccaagacatgtgctgatactcatatcaatcacagattgtttgccaattctggactttacgcctgattagcaactcatagataaaactgtacacctagaaagaaaactgatagcgctaactctcagtattccaatcgcatctagaatcggttgaataataacatcatcgccggtcccatagattactccaatgacagatgtgcaaatgctgattataaaaattaaagcctccattttcaaattattcctcttaaatttcttctagtctaatttttccaaaacagaacttccaatagttccctccggcatctccacttcaaaattatctgctatcgtagcaccgattattgcaaaagtattgctttctcccatctcccctgcatgttccatcaacggtgagtacgcaagaaacggtactttttccctagtatgatctgttcctgtataagtcgggtcgttaccgtgatctgctgtgaggatcaaaaggtcatcttctttcagtttctccaacaatttcccaagattcacatcaaatttttccaattctttagcataaccattcacatctcttctatgcccccaaagggcatcaaaatctacaagattaacaaaacaaaggcctgtaaaatctttttctgcaagttcaatcgtttgctccatgccatgtacagaggattgggatttatatgcttctgtaattccttccccatcaaaaatatctttgatcttccctactgaaattacgtcaagaccagccccttttaaggtatctaaaacagtctttccataaggctttaatgcatagtcatgccgatttgccgttcgtttaaattctccttttttcttccctgtgtaaggtcttgcaatgacacgtcctactttccactcatctttcatagtaatgtctcttgcaatttcacagcagctatacaattcttccagtccgaaggtttcttcatttccacaaatctgcaatacagaatccgcagatgtatagacgatcatatgtcctgttgcaatttcttcctctgccaattcatctaaaatttctgtgccactagcactcttattaccaataacaactctgcctgtccgtgcctctaactctctaatcaaatcttccggaaatcctgtttccgtaaatgtttggaacggctttgtaatatgcagccccatcatttcccaatgtccggtcatagtatcttttccactacttttttcattcattttcatgaaatgtgctattggtttttccaccggagcaatcccctttaacggatgtaaattagcaagtccaagcctgaccaaatttggtatatccagactatctgcctgctgtgcaatatgtcccaatgtatctgctccattatctccaaacaaatgagaatcttccatacttccaatcccaagggaatccaaaacaattacaaatactctcttatattttttcacttctgtaatctccttttattctagcgttttcctttaatgtctcattctttatctgaacatgctctatcaattttgtaaacttcgctactagtattcctgtgactagagcagaaataatcgttcctataccaaataccccacccatgaaaataccgcttacaacaagcaggatatctgttcctatcttgatatatgcatatggaatatgcgcattcttttcaactttcttcagtacagcatctaaggccgtcattccaagtttaagctgcatcaagattgcaaaagcaagagacatacataattctcccaataaaaaagtaagcactgccactatgacgcctctttttcccagtgttaatccctcaaaaaacattcgataaaaatcaataaagaatccggataacaatccataaacaatcgtccctgttcccagattatgtcttgccataaacaatgctatcacaataatcaaaacattatagaagaaagacgccagaccaaatgaaacactcagcaaatgggaaagaccatcgcaaaacaatccaatcggatcgcatcccagtccgctttccagaatcagcgcaacggcaattcctatcagattggttgcccaaaaaatgaaaagatattttgtttttttgttctgcaaatcaaatcctcctgttttcctcaataaaaagttccccctaccaaacctatggcagtgggaacttatagtcaactattacggtagttggtagaaacgttcaaccaatcttgaacatatataagtttctccgcatattttatttttagtatccttttgcttcctgattattgactaatttgatgatacggcttgtacctaaacgcttggcacctaactcaataaatatctctgcatcttttaatgtgctgatgcctcctgctgctttaatctttacctgtttccctatattctgtgaaaataactgcacgtcctccggcgtagctcctgctcctccgaagcctgtagaagttttgataaaatctgcacctgcttcagttacaacttggcacatcttaattttttcttcttcttttaaaaagcaagtttcaatgattactttcaagattcttgtaccgcaagccttttttaattcagcaatttcatttttaacagcttcgtaattcttgtcctttacccaaccgatattaatgaccatatcaatttcgtcagctccattttcaatagcatcttttgtttcaaaaactttgcaggcagttgtattgtatccattgggaaatccgatcactgtacaaactttcattttatttccaacatattcttttacacttttcacataagatggcggaatgcaaacagaagctgtctgatactgtatcgcatcatcgcagattgctttaatttcattccatgttgctattggtgtcaataacgtgtgatctactttactcaaaatcgcttcaaacattttagtctctctaattaaaatattactttttccaatgcaatatctataacttttgcaaattctgttttcaccctgtttgctgtttctaccacttcaaaatgtttcaacggctgatcaagaatccctgcaccacaattagtaatacaagatatccctaatacagaaatgcccatctgagaacacacgattgcttctggaaccgttgacatccctaccgcatcagctcccagagttcttgccattctgatttccgccggtgtttcatatgatggtcctgaaagcatcatataaactccctcttccagatttatcccttgttttgttgcagcttcttttaaagtatcccgaaattcttttttataaatgctactcatatccgggaatcgtggtccatcttcttctatgttttcccccagcagtggattacttccggaaaagttaatatgatcactgatcatcatcaacgttcctggtgcaaaatttttattcacaccaccagccgcattggtaagtaccatctttttaataccaagacgtttcataattcgtactggcagtgtaatcgttttctgactatatccttcataataatgaactcttccctgcatagcaataactttcttccctttacacattccgagcacaaatcgtcctgcatgtcctacaactgttgaaataggaaatcccgggatatcattataaggaatcacaattgggttctcaatttgttccgcataatcaccgagaccacttccaagaatcaacccaatttctggttcaaaatctgtcttttctcttatgattctgactccattatcaattattgacattacattttgcatactatcatttacctctttttccaatccccattaaagtttctcacaaaaaaatgcaacagtttcatctactattttatttacatatcccatatttggattttcaaaaaatccatatccgtgatccgcaccttctaatgtaaataatttagattcaagtttagaggagattattttacatgtttctggggaaactagtggatcattagttcctgaaaatacaatagaatcaactttttttgtggcattcttcatgatttcatttgatgagaggacatcatctaagaattcttgtccaagttctaatctttgaccgaaaaattcaactacaattttgtcttcctctactttgcttcccataattgctgcaaagtccattgcatcttgtgcaccaggtgcaatcagagccatagccttatatggattattgtccgcatcagtcaccataatagcaagacgaccgcccatgctgtaacctaaaatgcctaatctatctttatcaatattttctgtttctaatacataatgtaacacagcatttgaatcggaaatgttatgtgttaaactgaattctgaaaacggaacaacagattctccacatcccgaaaaatcaaaccggactgccgcaatccccttttctgctaaagcccttgaaattgaaacaaatccgattccttcttccttgcttcctgcaaatccatgattcattacaattaaaggatgctttcctccttctttcggtaaagcaataacaccattgatttctcttccctcattttcacatgtaaatactttttcaacaatttccattttccttttctcctttacgtttacattttcaatttttatatgattttttgtttacaagaaacaccaaaatagataccgctaataaggctgcataaatcaataaaatattactaaacagtgcacctttcgcttcaaccagccccacatcttttgcaagtgaagtcatggtcaacagttttcctgtaatagcaataaataaggatggacctattccggtcatcagattaaagaaaccgattccaactcccagctgattcatttccacagttcctgttaccaatttcataaatggagcatacatgaaagcaaaggatcctgtataaaggattgcagcaatcccaatcattacaactcctttatctacacagaatgctgcaataagggatgaacaaaccgcacaaaaaatcgctagcaataatgtcctaaagcttcctagtttttcaacaattcttccactgttcgctcccatcaatatggatgcagcatatgttggaagcaataacaacgacaccttatctaaagccaaatcatacattccttgtgccataaacggaaataaaaatccaaatgcagattgtaatccaaaaacaataagtgctaacaggttaataattacaaattttttatttttaaaaaatccaatattaatgaatgctttttcgtttttagtaatatacacaaaaaatgtaaccaagcatatccctgcgatgaccaatattattatattactcaccgagaaaaacagagaaataaacaaagtaaacaggcttaatagtgccattcctacaatgtctaatttatcgtttgtctttcccttttcatccggtacatatttcttaatatatggaatggttatcagtgacaaaaagggaagtgcaaatattacacgccagccgatatatgttgagataaatcctcctgcaagaattcctaccgctccagacaaaccaacacatgccgtattatatccataatattttgaatgtctttcttgtgataaatatttggttgctgttacaatcattagtccagaaccacaggttccaccgcataccataattgcaaccgcagcgacaaataaatagaaatgaacaaacgaacctacaatcgccataacagctcccacattaaacagagcaacacctattaacattaactttctaatactgacattgtccgataatgtagaataaataacagaagcaatgcccataacaagcaatccaatcattgctagcattgatacagttgaatattcaagattaaaatcaaccatcacttgtggtgaaataatattgaatgccccaagaatagatgccgaggttacaaatatcaacataaacattggcatagttttaataacatcttcttcgtactttttcattttcctttcctttctcttttataattgtatttgttgctgtattatttgtacatctctagtatattcttgcatgtataaactgtcaataattagtttaataaacaattaatttttataagtaattcacaattttttacattatcaattaggcactttctccagcatattattaaccagccggatttaattgagacggagtaattaattcctatcctctcaatcaagtaatcaatagaactttcacctcaaacttctcacaaaacagtacgcaaaatcttgcttcatactgctcttgtcatataataatatccttttctctagttactcacaccccggtctgatcacatcaacactaagacaattcggcaggacttcctgttcaatttctgcctaagaactttcatcttctatgcgccttacatggcgcaccagaaccgtaaatacaattttgtatagaggtttttcaataattgacatgtcaaaatttataggctgcagctacattattcaatccttcagctatgcaaggttgaaaacattccaatagtttcatgctataaatggctgaatcaaaaggaatccaaaaataaccggattaaccagaaactttctgaaagactgggacagattcataaggagcatccgaatacaagaaatcagagatgaatggtaatttgatacttagaatctgacgtaatcgtcaaatccgattaaatttaaaatatcgatattataggtgcaaaagtcatttaaaaagacctgcgtacgttgttcagaatgtcctgaacctgtattttcttgttggaaagtaaaatgagaaatggataacagttataacagaatttaaatatggcatctctttcacccgtatacataaactgtatttaagcacaatgctggcaaatgggtgttccatatatattgagttaccatactaaaaccaattaatatttgatacttttgtttgattattatggcgcgttatagccacctgtccgacaaagtcacagccatagttccggtggtacagagccaccttgattttacttgattgctttagacttgcttaggacaatacttgtcaaggccagagccactatagcgggcgttagctgcctttacaagtagtattccagtaagtaatctgttgaaaacaaaatcgtggattttgactggctttcactccccggaatggtggctcaaaacaatccggtataatcatttgttcaagctataaagggaaatcctagtgcacatctaaactttcatactaactgaagatatcaatataccgcaagcgcatttcaccaaaaattagaagggatcgggataatacaaagtatgtccaaagttgcagattttacagaaaatggtccaatggagggattctaagagattaaaacaagaaatgtattatggtaataatatctgacaaagaggaattagtaaaggcgatcaccaaatatatcgattattatataaatgaatacacgcaaatagggctttgatacaaccaccgaaagaatcatgcaggagagccgaatcatgaatagttacaggtagcataaaaattgcggcactatcaatgtgaattctcaattcttatagaaatttttgtaacataatcttcttctctagatatagcaaattcgtttattcctatctcataagcataaccagtcatttttaaatttttcttttttgcatattcaattatttgtttatatgcataaggtaatgtatcccattcccctctatggtaataagttatatatgtacctttaggtttatgaaaaatgtttttctttgatgtatggtgcaatgctggtgtataaataccgtcatagtttgaaaaatcgttctgtaatactttttcaatggaaactattgcacccacacccatacgaatttgttcgatactccatgcttgtgacatataggaaaaggaatttgaaatatcttcatcatcaaaatcatagggcaatataagcaatttctcttctttacattctgttatttcaatctttgatttatctaatgattggcatagttctatttgatttttcttttgatgaatcatttttttaatgagtttaagcctttttatctgattgtttatctcgacttctttttctactgcaagattaatgaatttttcttctgtcggtcttttaatatattcttcaatttcatcaatgctcatgtttaattcttttaacatgagaatatattcaaattcaatgctctgtgacaaatcatagtatctatatctgttttcccctttggtctttggtgaaaagagtccaatattatcataatagtgaagcgtccttttattgatgttatgaagttttgcaaattgtgcagttgttaattttatattactttctttcatacttattttcctctagttgacattacacttactgtatagtttattttataaaatgtacaaacaaatagcaaggaggaattaatatgaacattacattacgagagtataggaaagaagattttagtgcattgcaggatattatcagaaagacatggcattatgatgatttcagtagtcctaaaattgctcaaaatttagcaagagttttttttagtagttgcttaacaaattccacctattcccgtgtagctattgataatgggaaaccagtaggaatcatacttgtaaacaataaggagaaacataaatgtccgttcggtttaagattccagctaattacagcgattatatcactgtttttgtctaaagagggacgaaaggtatctaaggtatttgaaaatgtaaaatgcattgataaggagcttttaaaaggatgtgagatagaataccctgctgagctctccttatttgtggtggattcatcttgccgtggaaaagggataggtaaacagttgtttcagttggctcttgattatatgaaggaacagaagttagatactttttatttatttacggatacaagctgtaactatagattttatgagcttcaaggcatgatacgaaagggagaaaaaaatcttacatttaatatgaaaggacagtctgctaagatgaacttctttatttatgattataatatataaatatatttattataattacactaactgtatagtttgaaaaatttttctcaataagaggagaatacaatttaaaaaaaggagagggaggtgcggacaaaaaaactgaactaccataggatctgaaaggagcctattatgtattccaaagaacaaaaagcaactgcattagctgtatttcaccaaacaaattctgtatccgaaataataaatattttaggatattcgacaaagacgcaattatacacatggatatccacagaaaacatggtgaaaagagaacgaaaacagctttccctgtttgcaaatcctccggagcctccaagaaattctcccttagatgttaaacttgatgcaatcaaacgttgctttgaacaagacgagaatataatatatggatcagaagatatcggctatagcaggaccagcatttaccaatggataaagcgatattggaaagaaggtacattaggtctgatcaatcataaaaatattcgatttcaaaaacttgatcaaaatatcattcaggaaaaaacaagtgtttcgtcttcttgggaaatggaagaacttaagaaacaattaacacgtaaaaaaagaccccggcatcgatcaggctgctttcagcaacagggaaaaagcagtgatcatcgatgccctgaagaataaatactcactgctgttcctgattgaaaaaactgctgttatccaaaagcagtcattattatcaggaaaaagtgttgcttcagctagacaaatatgtttccctgcggatacgtatcaaagaactatttaatgaaaataagaacagatatgggtgccgtagaatacatgcactgctcaaacgtgaagctagcattttttccgaaaaaatcttgcggaagatcatgaaagaagtaaatttggtggtaaaggttaaaagaacagccaaatataattcctatgcaagtgaggtaacaccacctgttccaaataaaatagagagggatttttctgcagaaaagcctaacagtaaatggttaacgaatattactgagtttgctattcctgcgggaaaagtatatctttcccaatcgtggattgttttgactgcttattggttgcatggaaaatagggatatcaccttattccactttagtgaatacaatgctgcaagatgcactgaaaaaattatctcctgatgaaaaacctattgtacatagtgacagaggggcacactatagatggactaacaccattgggaactggggccagatctacggcgaactgagtattatgtatgagggacggcttccggaataaaggaacagcttggttaaaacaggcgggaaagccgtctgttattgacatgccatcctttggatggtatatataaaacaaaggtggaatgcctaatttctaaacattccaccaaatcttatcatagaagaatcctatttacagacttttcttcataccctcgacaaccaaaaggattatattttttcacaatctacattatggaaggcaccctcgttaaaacgataactcttttctatattgttctatgaaattttcgattgtattacatactttttaattgaatatttacacgctccattggtatatagtatttattcaaacaaatgactattcctttgtcatcaataagcttttccgtcagtactacatatacacatttttcatttttcatttcactctcaatgcttttaatcatattgatttcaacttttcccactttggcatacttatatatatcattgcggattaatttcgaaacctgttcggagttcatcatatctatttcaggtacaaaatccaaatctgttggcagagtagaaaaacattttgctatgcattctttatcggagtaatataacaatgtcgcagttaaaaatactggtatttgcctttcaaaaatattatcggtatataccgtagattgcctcaaacacggtatgcatgtgattttatcaattttagaaattccacatttcggtaaaatattaccaatttcttccagtccagcagttaaatatttcttttgattccgtaaaaaattacctacaccttttctggattcaatcacaccatcttcttgtaacaattgtaatgcctgccgaagcgtcactcgacttactcccatctgtttagctaatttaatctcattaggcaacttattttcctgattatacaaaccatctaaaatattttttagaattttattatatgtctcaacataaagaggcggcttatccttcaaacgattattctccattactctattctcccgttttgccaatacataaatgtaaatcattaatagaacctcatattaaaacaaaattttaccacttttaaaattaatcgtcaaatcttctttctgtactgccgttttgaatggtaaaatatattcacctaccatataccaagggatttcttagaaaaaaaattatccacaacttgtgttttacttctgaacttatcctcttttgtgatactaatgaccaaattctccagttttgtaaacatttcagttcattttcttcttggcagacatcattttcttggctatatttatctcagttgatgattttatatttatatcaactaagaatatatcttcttttgttagttaccgtccaaagctggctggcaaagccgaagatatatatctgttactcccgttttctctagataataatattatacagatgtttcataaaagctggaatctgttccatcagatgttgcaaaaaagcactcgctctccctcgtgcattaccacaccttcaaactttctcctagttttgttatcatcatctaataatcatatgggtaacacctccatcctctgtcttcttcacatttggatatctaaacattgctaaaaaatagcgattttgatttctgaaaaccgctatggaatgaattaatttgttgagtcaaccgctatgttcgaaattcttgattgttatatgtcagatttcatttgcatcaactttttaataccatggagagttgaaaatcggaattactatattctgctttatgtaccataacttcttataaataatatatacagtaagcaagaaccacatgatgtaatgtatgggtgtggattacaccataaaacattacatcatgaccggcggctcatttgtggcaagtgaaaaggctgttatgatcaaggaatctactgtaaccgtcaaccacatattcccacgaaaggaacttgtatggaattggcttataccaaatgcggtgcttatctcattcccgaccttgtgttgttagccccgtaagagtatcatatctggaaatatggtcagatacactgtgtacctacttgaaagaacacaggccattccgtttacctatctcattgtcacagaaaaaccgtttcctcacttaagggaaatcaacactgttgcagcaaatagtacagcctacttctgctgtttaacagccaaaagcagtgtccctaatgctgaatgaagatatatagcaacagcccgtacggagaatatttcaacatgcatagaaggaacaataaacttttcaaaaaggagagcaggaacggtaacctccgtccctgcttcctaaatcaatcttttaccccttgagttttattcagagacttcgaaaaaacacaatactcaatggcatgagtggggcaaatatttttgcatattccacatcgaatacactctagactgttggcattctttaccggatcgcaccccatcttacaggcttttgcacaagcaccacagttgacgcatttttctgaatccacgcggtagcgcagaatggaaactgggttgaacaaggaataaattgcgcctaaagggcagatgtacttgcaaaatggccggtaaatcagtatggacaccaaaatggttacgattaaaatgacattcttccaagtatacagccatcctactgtggctcgcattgcatcattcagcagcaccaagggaattccgccctccaaagttccgaccggacaaatcagcttgcagaaccaagggtaaccctggccaatcatatcagtgatatacagcggaagaagaataacgaacaccaaaagaatcccgtatttcagccagcgcaactgacggtcacccttaaatgtacggatcttcaacttggaaggaagtgggattttgtttagcagatcctggatcaaaccaaatggacacagccacccacatacgaagcggcccatgaacgtaccaaccaggatcataaaaccggcaacataaaaggcaaatttatactcgtagcttccaataatagcctgcaaagcaccaataggacaggctgctacagcgccaggacaagaataacagttcatgcccggtacacagatattctttatctttccttgatatatttttcctcggacaaaaccgatgagataactattggtgataaccgcccataaaacttgaaaaatatggcggaatcgttctgatttctttacttgattatccaattccaatacactccaaacaaatattgatagccttgctcatgacgacagcatattcttcccgccagattccaagacccagaaatataacgccgatgactagcaacaatactgtaatccagttagaatgaaagatttttttttgcttcatagacttacctccttgatgtcactcattccctcaacgcttttgcagggtctgttcgcagtaattttgcattggctatggcagtaataaaccataccagaaggacagttccgcaaatgctcccagcaaactgaagcggggcaatatgaactggcagaatccctgacagggcggtgaaaaggagcgcaaacaatgtgggtgtcaaggcggaaagagatgacaacagcaggctttcccaaagaagcatcttttggatctgtccacgatgatatccgagtgccatcagaagtcctatttcaccagagcgcatacgagccagcttcatcagtagcatcccactgatggtaaatgcaatcacaacaatgaaggctgatacaagaataaacatcgtttgcaactgcataaaggtctctttcaaactttccacctgttttgcagctgtaatagggacgattccctgctccgtaagctgagcaactacttccagaacttcgtcaaagccgttgacctgataagccaccgatacaggggactcatcctcttgcaaagtgtcatagagctcctgttccgtttttgcatccaggtagtagtcatcaaaactgccactgtaaatgccgctgatttgcagtttccttgaaaaattaccacaggagaagactatttcttttccgatcagcgtacggatatcctgtgcaaactgtttggcaagggatggcgtgatagcaatttccccatctctgggcatgacaccgatgttcatggactcgttggaaatactaccaaattgttttggcggaacagaaaggctgtgtcctccaaattctattttgcactctgggactggatactgtacatagtactgctggatatccggagatcgttcaagcagtgaaagtacctcttctaccgtgtcattttccttcagtaaaatctgtccccaggagaacgcggtatttttttgctcaaagtgattgattttttcttctattatgttttgtgaagagaatgacataagtatcgcacatactgcaattgttactgcaagagcaattccaaaaaatcgtttaaaatgcgtcttgaaattgtgcaatgctctcttagacatagaaacgggcacatcaggaagtttatccttttgcgttaaaactgtaactgtctgtttcttcgtctctttccatactttacatttaccatcttctatggtgacaacttcatctgcataatcacagattttacggtcgtgagtgataatcaagaccgggctttgttttgcaatctccgaaagaattgccataatctcatccgcggttttgcggtcaagggctccggtcggttcgtcggccaggatcacctggggatttccagccaacgcccgcgcaatagccacacgttgcttttgcccgccggaaaggttttctattttctcgtttgccttttcttcaatattgagacgacgcaacagagagagagcccattctctatttttagcgttatcctgacagaccagttcagcggctaacaggatattttctagcactgtatagcctgtgagcagatggtattcctgaaacacaaaaccgatggtatgcttgcggtactcgcaaagatcttcatccgacagttccgaaagtgcttgcccatccaccagaatctttccgttgtattctcgatcaaaccccgcgagaaggttaagcagcgtgctttttcccgatccggatgcacctaacaggcagataatgccgttctctccaaatgtataggaaaatccatccagcacgatttgatccccatatttttttgaaatattgttcagttcaatcatccgcgtcctcctgttttcaaggcagttagaggattaaccaaggtggaaataaggcaagtctctgcaaagcagaaggcagacacgccaaaactaagcgcacatcccagccagagagggacactcagcaatagcgccacaatcatgctaaaaagtccggtaaacaagaacattcccgtgtattccaccagcgtcagcaagacgataccattttttgtatagccacagaggcgatagacagcatactccttcctgcgcataaagccgcaaatcaagcatacggaaagcgcagccaatacggaaagtatgacaatcaaaacggaagaaaggccagtctgcaccagagcagttccctttagtcccataatgtcccgaatcaactcagcctgtcccagcggcacaatgccctttgccatcaattcatcgtaaagttccaaaaaatgctcgggagaatctgcgcggatagtgaaactaaaactgggattttctttctctgcctgagcataaatatctttcataattgccaatgacggaaacagggaatcctcgtgctcgaactgctcaactttaccatcaaattcaatgccataagaggtatccgctataccagaaaccttagcgttaaaggaaataggcattgccaccggtttaccactgtcccagttatataccgacccgacaaaggaaagctcttttccgagaatctcttcattcgtatagcccatttttttcactaagattttaggcaaaacaatttcgtttttactattatcggcgatgcgaccggcaatgatctgattgaagtttggggactgtccgctttcttcaataatgaagtccttgccatctacagtaacaaccatatcttccatcggtgcatccatgatgatagcctcaatacggctatcattttggtactcctccagcagtccgctgatgtcttgctctacgccttgtggaacaccaggattttccttgcctacctcgccaccacttgtaaacgaaggaacaatcagaagatttagaacagagtttccctgcttttctaaaagctcctgaaacgcttcactgctacttccatttaacataccgctgaagttcacagcaagacaggaagcagcaatcgccattgcaaggacgatagagagaagttttcccatctggcgcttgccggtcactccggccatccgcagagcagagcgcatggtcaggcggagattctccgtggagcgactatgtactttcgtggtgccgtcacctttgtccgatctaatcagtacgcctttatctaactcaaaaacggagcatttaccttgaatgagagagatgtcgtgagtcacaacgatgaccgtccgctctttggcaatcgacgtcagtagtaccccaatctcatgggctgttttcgcatccaatgcagcagtaggttcatcggcaataagcacctgaggatctttcatcagttctctggcaatggctacgcgctgcttctgtccgcctgacaatgtgcgaaccttctgatcagccagcttttcaatccccaacttttttaagatcatactcagacgtctttcgctatcatttcgactcagataggtcggaaccaaaatgttctcccgaacagttagttcgtcgatcaagtggaaaccctgggcaataaagccaagttccgttgcatagaactgtgcgcgatcctgatcagaaagttctttaagatttctgccacaataaaacgcttcaccttcatactgtctatccatggaagaaagaatgcggagcaatgttgtttttccgctaccggatgcgccgatgatgtagttcatccccccggtaatggagagtgacacatttttcagagctacttctgccccgaatgttttggtaatattttttaattcaaacatgggttattcctcattccctttctgagcaatcttctcaatttcgtttttcattgtgacacgccagtgattcttgggcattgcgccaacataaggctcactgaccacatttccttcgctgtctacaaagaaactttccggaaatgcctgaatgcccttcaaacgaccttccagaaggacgctgtctgggatcagggtaggatactctactcctgcggttttaatgatctcctttgcttttttcaggctgtcctcattgatctcattggtatttccaacatccatacaaacactgataatgttgaagcgaacaccgtcatcctgaaattcctttctcagttcattcaagatgggcatttcctcaatgcaatagctgcaagtggttgtccaaagattaaccatggtcaaatcgtaatctgcaaaaatatctttggaaacagcatttccatcaaaatcctgtgcggagaaatcgcccaaagaaacaggcgtaggctcgttctgttctgatgtggaggacccctgccgcgcctcagcgacggtggttgaagcccctccgtttgtgtcggactttccacaagaagctaagctaagtgccatcaccagcagcaaaaatactgaaatcatttttttcatcttaaatacaatcctttctttgttatagtgtagttgcattacataaggagtatagcgcggctgatataaaatccatataaagaggacgccggaagaatttcttccggcgtcctctctcattagatatttccttcgtagtgaattctgtccttttctttatatattactattaaatcctacgataaatatactgccttgaggctgattgtttttcacgtaaatgtatccattatgcttttctataatactttttactatggccagcccaaggccactgccacccagttctcgactgcgagacttgtctacacagaaaaacgtgtcaaaaatatgagacttagcctcatcaggaataccgataccggtatctgcaataattacctgagcatctgttatttcgatgaaaatagagccgcaatctacattgtagcggattgcattggagatcagattaaaaaacgctcgctgcaacaaactgtcatcgcctaacactgttccttggccagaaattgttatttcaatctgtttagtagcggcatattcctcaagttcaaaaaccgtttcttcaagcaaagatctcaactctactggttccttttttcctatcccttgttcgttggtaaatgtgagcagatcttttaccagattggaaagacgctctgtgctttctccaatactttgtagtaaatctgtatattcctcaggatttcgatctggcttcatttgaaatacatccaactgggtttgaatcgcggcgagaggggtgcgtaattcatgggccgcattagcagaaaaattcttttgtacctgataggacagattgagtttctcggtcatattttgaaatgcctgagccaactttgcaacttcatcttttgtttgtggaattgagacaccctcatccagattgtgaatgtcaatatgttgaactctctctgtaaggtcttccaatggcttaagtgttctggaagcaaacagataggttaaagctgaacctatcgcaataaggcagaacatgaccaacacggttgttcccctaaattgccacagagcttccgtgactgcaacagagggctccgatgttattgctggcatattttcatcaacagaaatcgccggcgtagtaatggtggcctgaaccagtccattggtcgagtaaatagtagagattgcaaacgccatacacataacagttaaaatacatactgaaatagtagttagttttagctttaacgggatacttcttttcatacgcttcccccctcacgaatcacatacccttcgccgatgatgttacagataggatcatatcccaactgtgcttttaacttccgacgcagggaggacatatggactcgaactgaattagaaaaggtgtctacattactgtcccatacgtgttcgatcagttcttctaacttgattactcgtcctttatgcagcagcagatactccaatagggcattttcttttgtggtcagagaaactggttgccccgctgcggttacgattctggatgcagtgtcaaaagaaagggccccactggacaaaacagtgttttcgatcactgttttcctacgtaacagtgagcgtacacgagcctctaactccgcaaaatgaaaaggtttagtcaggtagtcgttggctcccaaatccagcccttttaccttgtcttcaatcccatcacgggcagacagaatcaacacaggtacatccaaattttccttacgaaaattttcgagcacagaaaacccgtctagcttgggtaaattcaggtccagaatgatgagatcatatctttcataaaaggccttttcatctgcactctctccatctcccgctacatcaatagcatatcctttcaaacgtagcccttctgcaagggaattacgcagtttttcttcatcttctacaatcaaaattttcattgtttcaccccacttctacatagaatatacaccataaattataaaatttgtataaaggcaggaatcctccttactgattgaacaatctgaaatctatctttccatcaagttcctacctagtttattcatgataacataaatctcacagtaagtacattctatgaatctaaaacggtggataggatagctgaaagagcaaatactttaaattgccgaattgggaatatctaataatgccctagaaatgtttaacaattctattttatggttatttttcaagtacgttcaccataaaagtttggacaaaacacccttgataaatttctttccagctataaattttgaaattcaaaaagagtgtcacatcccaacatctcccataatttcactttaaataaattatgacggttatgtgtaattcgttgtttttaatgaaaacataaataacaacaacgctatcatatatccatatctgataatcagaaataaaattgcccactgtacatgggttccaaatcaaaatataatctctcctcaaccgtagatcaacttcgatttaatcgattttctcctctcagtcgcgataaaattacttttttttatacacaaagcaatttctaatactcaatttttatagaattttcccaaatcccaaaattttttggttatctatcgagtaattatgttgccatactccacgatccgtgtttccaccaatattcgtacctgtatttccttctactgtataaatgattccaccttcatatttttccacgattcccacatgatcggatatgccatctccgttccaatcaaaaaataccaaggaacctgcactcggaatgcctcctgtttcctgccactttccatgatttttaaaccaatcaattccattttcacacaaagaaaacttcggcattgcaccaaattctatcaacccggcttgttccccacaccaactgacaaagcaggcacaccattccacataagaatcaaatccataccatctccagtatttttccccattactactcccaacttcctgttttgccacttgcacaatcagtccatttccaaatattccgtcaaggataccaactcctgaatagtatctctgaacatgaggaacatattgaggatctccatatcttggccaaccaagtgccgccgccttctcttggctaaactgcaatgcattttccagactataaccgccataatgttctaaagcccatccaatataaccatttccgtaattatatccttgccaactgagttgtagcctgctgatatctaatggactttcacatcctgcctgtcttacacaatctgcataatactgcacccctacctgtatcgaatactctggatcttgaattgcccctggactatttggatatcgggtattgtacggacattcacttgcctgcataggatctgttccgcgtcctccggattcctgcatcatgattgcttggattgaaggtacatattccgaaattccatactgtgaagcatacctctgaatggtagatgtataagccagtacctcctgacttagtggctccgcactagtactcccggagcttcctgcaattccaccagtcacccccagaacaatcaccaacagcacaacaatccagccgcctgccgccagaaaggttcctaatgattttactgcggtaactcccgttttaaccgctgtttttattccagatactgtccgtttagctgcctttgcagattgtgttgcagcttttttcccttggacagctaatttttttccagaacggtaagcatgttctgcctgtttctttaattttgacgcttcctttgaaggttttgctgtatgtgcttgtttgatacgatttgcagaatctctcaaaggattagcacttttcacatctgcaatgttctctctcgctactcctgccgttcttttgtttaccgcttcttttgttttaattcgtatatcagtttgaagttctgtttgcgaatttccttgagttccactgtttctactctgttcagcagtatgatccgcatttttactccttcgttctttgatgactctcccggtcttctctgccattttttttgccgcttttttactgccttgagaaacgatggtttcccctttactggccgaccacttgattccttcttccagccggtcagaagcatactgttccggagactgtttgggagaaaaatgagaaccgtcatgcgtagatagcagggaacgttctgcggattttaaagtaatatcctttatcaattctttgggaagctgtttggcatgttcccggactttcaacgtccggtctacctcttttgttttaatatctgccttattctcctcctttatcgttccacctgttttttcctatctaacagtttctgcatatctttttgtgctttctgtaccagtgggtgcttctcataagcctccacaagtgcaattaaatcccgctccaccccatttccttgatataaaggatagtggatatcactgtactcaggcacatctgaatcatgtaaaataaatccaatcccaacccccataccggatcttttctgttccattttctggtatatccgaaaggcttcttttaatgtggcacactctgtcacttctcccattgtttcaaattccatgcattcagctgtataaaaagatattttcttttcctgtacatcttttatcacatttacacaccctttctctatgaatcaaaaaccgttacacagtcccccatgtaacggctttcatattttttgattcaattatgacgtactgtaaaacacatttgatgaacgaacctatgctatacagctttcaaactttctcctggttttgttgtcatcagttggtacaactttgtattccttgggaatgtattttcaaatggaaccagatttccagaacagcgtatcaaaccacttccagctttcacatttgtgaaatatcctaactggttgtcggaaatgttcaaaagtcttgccaattcttctcggtccgtacttgcctggttcagcataactaaaaactcactgtttgcgagcatgagtcttgccgtatcggaacgtagaacctcatctacattctggctcatggcattcacgaacccattatactttcggatacgcttccataacttataaaaaaattctgcactgtatggatagcggaataacagataaaactcatcacaaaagatccaggtccgtttcccttttttccagttctggatcacacggttgaaaatggcatccagtgttaccaacatgccaaggggcatgagctgggaacccagttcccggatatcataatccatgatacggttcttcgtatccacatttgttttatgtgcaaacgtgttcagacttccactggtaaataattctgctgataaggcaagagctcttgcttctggctcttcctgcagcatcagctgtcggtataagtcctttaaagtcggcacttccttggtataaccgctgcggatataatcacggtaagtatcagctgtacagcggtcaatgatggatttgtcctttgctcccagattacctgcccctaccaactgttcaaaaacagacaacagaaattctgatttttcaatcagtggattggtatcatccccatagctgctgtccatatccatagcattcagatgctttccagaagttgccgatacttttacaacttctccccctaatgctactgtcagatttccaaattcggattccggatctagaattaggatgtcatcctccgtggcaagtgctaatgcaacaatctcttctttggcagaaaaactttttccggatccactgactcctaagcgaaaactgttgccattcagcagtttcttccggtccacaacgatcatatttttgctgaccgcattctgcccgtaataaatccctccttcctgcataatctcctgggtatggaaaggaatcaggacagccgtagactctgtggtcagggtgcgcagggcattgatctttcgtggtccgaaaggcagcgccgtatgcagaccgtccatttgctgccaccgcagagtggacagctgacacagatttttccgtgcaatggatttcaaggtttccgtatctgagttcaactccttataactgtctgccatatgcacaatggtcaacaccccgaacatcattctctgatctctggtggtcaggtcatttaacatctcctttgtttcggttctctgcaactccatctcgtacggaatggttgcagaaaagttattgttttcgttctgccttctctgccagttggtcacattagtttctacaccaagcagtttgttctgtatctcacggactgcttcatccgtagggactggcaggatatcaatcgacagcattaagtttctgctcagatcacagagttccgataccatgctgtctcggacgtaagttgcataatcctgcatatacaaaacacgcccatatcgcccatcaatcttaaaatgatcctgcaggaactccatagaatctggtgcaaaccagtctttaaaatcatgtcctctttttacagcttccttaaaatcaaactctgctgtcgcagaaacgtcttctttaaagaaatcacggaaaatcttcagacgctctccagcatccagttcttccccaatggaagatagtttcgccaggtgtgtggtaatatctgttcccacacgtgcgaagtaggtccttgcctcatcaatgttcttcttatggacactgatcgtcagataccgttcccgaagaatgctgttgttggtatcactgatcttggataacagcatttcattgtattcttttcggtattcatccaatccgtcctctttcatagggatcagaatggattgttcaaattctgccttattgatgcggcggttattaatggtaagtttggcggatgcgccggagtccaatgcatttaaaagctcggaataatccagaaacatttctgtcttatcctctttgcttgcaatggaataattgatatccgtaaaacggaacgattttgaaaacagcctgccggactgaaagatgccatccggccagatccgctgtatcgggattgcctgctgtacagacttcggaatcataaatttctctttttctagttttaatgtacgatgcagcgttttaatcaaccgcatccccccttcctttcttttttctatttttgcttctctttcgttctaccagctccgtgccatttctgcaggaacgtgttccgatttctattgtctcttccagacatttcagatagagattctccgattgaaacaccagctttttggggcataagatctctgattttaaccacacccatacgaacttttccagtgtcatctggtgatagcggaaaaaaccacatcccgcaaaaggggctgcagcaaaaacactcagccatccggcaatctccgttccacaggtatcttttgtccctagataaacacctactgcagcagcaatcgccaatacagaaaagaaacactgccgcatgctcagtccaaagaaaaaggactcctgaaattcctggatctctttgttcatttttacttccattttgtcaatacaaataacagaaaataagccaggggacggccttttctgtcataactcctttccttttgtattcccacattttaccgttccatttgatttcgttttttctttttcggcacttggctctgttcttcaagttctggatgatccttataaaaacgtttcattccttctggatctaattcctccagccgcttaagatcaaatgccacttttgcataggtacagaatccagaatgtcctcgctctggaagaattttacccaacttatgtttttgaataaatttcaatttttccttactcccaaagtcctggataaaggcctcatgaacatccgatctctcaaacggtaaatttaccgtcagatcactaaaagattcccatacaccatcttcctttgccagcattccaatatacagaccttttcctgtatagtaagtgcctatctccagtttgatttcttcatgtcccatttcccaatcatatcctaaaattggttgttctttcatactcctgcctccttacttataaccccatgatttcttttacaatccggtccgctgccttaattgcccctaccaatactaataggttaaagatcagctctgccacataattccatacaatattcaccgcagataaactgctgtctgcgattgccggcggactggcagcaaatacagaaaaaataatgcaggcaagtgcaatgattgctccttccatacaaacccctgcataggaacggacaaagttcttccctatgttctgtgtaggctctcccgcaaaagtcgcaatgggaatgggtgctatggctgtgtacatatacagcttgaacatccttccatacacggtcaagatcataataaatgacaagactgtaataaacaggctgccaagcagtgtaacaatccaaagaggaatagaatctaataatcctacactttcaatcttctccaccatttcagccggaagttcgattacatctgaatccccaccaaatcctgaattttgcatgattgtagataccattccctgtatgacagaaaaaagtgccatcatcaattccagcccataccctactgccccttttgccagtgcaaatcgaataaacaatttcaccgcatgctctggcttttttacgtccagatagctgctacaggttttcactacactgatcgcaaaaaaaagtactaaaagtccatacccgattccttttagagcatcatgaatggtcagcatcacactccagatatctccgcctttaaaggtttccgggctttgcgttaaaagctgccagatttctgacagcttagaattccatgtttctaacgcattgtttagattttgaacgatccagttatcactttccaagtagcatttcacctccctgttgtttccatttacagacagggagaacagcacagtgtctgctctcccgctgtactgctgatatcagattacaccatgatcaaatccaaaatctcttttgcaaaggtaatgatgacgccgcctgctaaagtcaaaaatccatttgccctctggcttggatcatgcgattttaaagacaagccgatctgcaccacaccaaatcctaacaagatcaagccaatcgcccggatcaaggaaaaaataaaatcagacaagttattcaccactgctaatggatctcctgcagccagaacaggggttgtacaccacatcatggcgaatacgattactgcatagctgacaaaaaatcgtttttgtacaccactcattcgcaaaggcttcgtcttcggattctttttcttaaacaatttctgcatcatatgcacgatacacattcctcccatctaaaaaggctgctctttgccgaggatgtcctcttcacagagcagctcataatcatctaagcgttcaatatcaatattcaaatcatcatgtgacctcggagctttcgcatagtcatacggaggcgcaccgccatcctctgtccatttcacatttggatgtttctttaaattatatttgtcatccagcatgggacgttcccctcggacaaacaggattgctttccggttatccagtaagcggatctcatccggtgtaaaaagttcccgccctgtctgctgatagttcgtagaataacttccgtttcgtccttttgtctgtccataagtattcgtatctaaagtttcttttcccaacagttccgaaatatatttatgtccctctttttcgttgcctcccagatataaaaattcatcgcaattacctaccaagctttcccatgagtccttaaacagggctttcatttgcgccatattctggatgatgatactgcaggaaattgcgcgtgaccgcatggtagcaaggatcttatcaaaatcatccggcaaggctacattcggccactcatccatgatacagtggacgggtaccggcaatctccctccatattttcggtctgctacataatacagtgtctggaacagattgctataaatcatacctaccagatagttcaaagaagtatcggcatcggggatacagcagaacaacgccactttcttttctccgatacttgccagatccagctcatccgtacaggttaagtttgcaatctctttcagattaaatgcagccaaccggacaccaacagaaatcaagatagactttgctgtttttcccgctgcctgcttgtaaatctgatactgtttcaccgcaatgctgtccggctttctcatttctaacctttcaaacaaaatgtccagaggtgactgatattcctcatcttcttccttaacctgggcactacctaacatctccatgatcatagggaaattctgctcttcctgcggtgcttcatgtaacaggtacagcatcagagcctgcaacagcgctgtttcgctcttctcccaaaatggatccgatgcctgtgaaccttttggtgttgtattgcggatcaggttgttgataagttttaacacatctttgtcatcatggacataacaaaatggattataacaaaaggatgtatccgggttgatcagatcaaacacccgtacctcatatcccatccgttccagcagtcctccagtcttccggagtagctctcctttcggatccgttactacaatggaacagccaccgccttttttcgactcagcctgagagcattgaagaatattaggaactgcataggtacgactttttccggctcctgagccacccgccaccaagacatttaagtttctctggtgcttatagacttcctggctcatgcgaaagttttgtgtcaaaagaagattatgggtatactccttgtctgcatatctcttacaaatctgatggacgtctccccaacgggcggaaccgtgttccacacctcttctataatttttctgctgagaataatagatacagatacctgtgatataggcaaatgatagaatcaagatacactttcccgtatatacggtgtagtgcaaagaaaaaggctggcgaagaatctgactcagcctgtctaaaatttcaaatatattttcccctggttgaatcgcacaggcaagggaagcccccatccaccagacaatcggaagaaaaatcccccagacaatcaagtctgcttttctaaatgttacctctgcatgtcatgctcctttctcttatgcggctctcctattttatggaacgaatccacttctggcaaaaccgcaagggaactaccattctcccagttcacatggatctgtccggcatcatctacgtaacatacttttccttttaatccagagggcatattcctttcaccctccatctcatctaagcaaatctgcgttccttctggatacatctttcgtatgcgttctacctgttttcgatctaatatctgaatgatcacccctccttttaccacgggaagtgcttggtcctatggggtttcataacctccatgatagctgcttccacaccatcagtatattttccttcctctaaacgctgattgcggagatcatttaaggcatggcgaagaaccctctgttcatcagaagtgatttccatcctcttttctttcagatcaaaatcccagagttttaaacccatttgtcttgcctcttctgattcaggtccttttttccggtaaagactcagcaatgcatctgacatcatatttcttctggtttctttcatttcgatataatattttgtcatatataacacctgcctttcttacaccaaccatatcacacacgttccgcaatagctatcacaaatccaacttttactgtgctttatcgctctggttcatttttactctttttccctttgtccggagattttttctcgctttctcctactgtaaaggtatcctctgtcacaaactgctgttccggctcccgcaaattccgttcgatatgaccacggattccataagctgctgtccggacatcatttaagaatagccttaactcctgtggatctttctgaccatgctcctgaattcctgccactttctcaagatcaaaaccggagacatccacaccatatctttttcctaatatgtatgtggcacaaaatgcctgtgcattaactctatttctggcatagtttccatcatgctggtctagtgctgcacaggcaagttctcggttaatagcatgaaaagtagtaatctctgacattccgtttcgtatgtaaatcgtcctttgatttggaatatattgtgcctgaatcttatccggaagattatccgcaatctgcagacggatattctgatttttcaacactgcttccaataatgtgtggatatctctctgaggacgttcctctaacggccttcctttggtctgcgtaatatcatagcccttgctgatcgcataaccggaacgcatttctccatccttctcatactttgtatcaataatataagtataaccatgtactcctgttctcaaggaacgtctgtcatgcttccactcatcaaaagattttaccagctttacttcgggattctgggaatataaaagcaaaaggttcggaacctttggcatattatactgccctgccataaaatccagaaacttctgcaaggacgctccatccttgaacaccgactgtgcctgtccatcgatctgcatccacgtttcttcccgctcctgtttctttaaagctgcatactcttctttcgataacttttgctccgagttctgatcctccacaggattctgaatcatacctgttaaatccatatagcattacctcccttttccctttttcttgtattttcgccctttcgtcttttgacgctgtctgctttgtttctgccgattcttctgtgcctgctctttttttatctctttgatctctgcacgcacagagggctttgctccatgttccctatttttctgaccggaagaaaaatctctgctgggcgaggaagtcccggacggaagcttttcttccttcccctgcgtaaaatttccttcttcaaagaacaaatccccaaaatcaaacttctgatccgattcatcaatttcaaattcaatggttccttccggcatagatactgtttggactttcttttcctgtccttctttagtggttctttccagttccattccctttgtttcttctttcttgggatcgcttgtatcaaattccactttcccggattctgcttttacatagtcaatatccatgcgatccaatacccggttcattttggcagcgtcttctgcaaataccataatctcgttattgattggtttctttttatccttaatgacgacatataaaagacctcttgcttttgcttctctggcaaattctttcatacggtcatccggcacggtaaaaaatttggtcggccttcgttctttgatcatacgtaccatctgtgtctttccataagtctttttctggtcttttaacactgctacgatgaaaactgccagattttttgcgatactcccggaaatccgaagcgtatgttccatcccttccatcgaataacgaacaatctgatctgccgcatcaccaccgtaattcataccgctcacctcctcgattttttacttcacataggattcctttatctgctccttctttcgttgcatatttttctctgcctgttccatcctctcctttgcccgtttcatccgctgctccatttctacggaatactgctcaatccgcagcgacatccggatatccttgcggatctgtttcatctcttctgtaatctttccaatccgttcacatccgggctggctgcgatacagttgcccgcgttccaatagcaactgtgccattttttcttccagcgggtgccggaattcctgcagctgttctagggtggaaatgtcctgtttctgaagaaattctatctgcgcaatccgctgatccagcctgcggatatcttcccgcacttcataagggatgcgcttgggtttcttttgaaaaacacccatctgatacaaataggaataatacaatgcctgtagtccggtccgtttctttctttgttttgaccattgcagatatactttttctgtctcccgaatctttggtcttaagatccactcccggatttccatttctccatatccttttcccaaagatcgtaagcgtacatatcgttccattccaggagcctttagagcaagatatttcctatctgtccgccatacataacctcttgtttccatttcttttacaaactgagtccagctgtagcttgctttcactgtctcacgaatatccgaacggatggctgtccgccaggttggttttccctctttctccgctttccattgtacataatgtatcccttttttctgatttgtctggattacggacaacccatattttcggcaaagttcatcggaaatctttcgaacctccatataataactttgttcattgctatgatacttatgcccatcttccatagacacggaattccagaccagatggttatggaaatgactggtatttaagtgagtggtgataaccacttcaaactgtcctctcagcagacgctctgccagttccactcctatcaaatgtgccagttccggactaacctctccctctgcgaaactttgtaccagatggaatccctgcaccttgtctgttttatgaaatctttttttcgtagcaaccatatcctgatatgcctgatctatggtacagccaatggcatcttcaaaaaacacttgctccgttttatcccggttcaatgcataatcgattgcttcttccagagaaccggccgtattccctttcttttgagtcttttctttatcccggatatagtctacagaacggtccaggcggtgaacgggaataatacttgtatatgcaataagccatcaccacatttcccttacttcttcccagacttttctggatatcctcagcatttcgttgacactctcctgactggcagttcctgttgcattggcaacgtgtgccagctgattcgcattattacacaatcctgcaactttccgcagcaaatctgcatgatgggtacaaggctttgcacgcacttccgcccctaagatcaaggtacggagatattcttccctgtttagcccactgactgcaacctgtgtctccagatgtttcatttcttttgtattcagccttataggaatcacatgattgcgtttcctcattcagacaccttcccctctaatgctgatgtttctttcttcttttcaatatgttccatatcctcatctgcttgttttcctatcaccgtaaggcacacaattccaactccacacataccgccaaacattgcacctatgataaaattccacatatttgatctcctctcatgctttgttacgggggattggggttctccccaaagggcgtttggatatccaaacgctatgcttgcaaaacgagtcgcaccgcaagtctgtttcctttccccctctgttatttacttggtttctttgatctgaatcagtccctctaaagtcgtgcagatgatatgcagtcgatccgcagtactgatctctgtattcatgttttctgtcacttcatttccgcagactactaccatccggcatcgttttaaaagaagcatggacatctgagccagtccctgcagatcttccgcattgctctcatccagaaatggcacaaatccaaatctgggacagattggaatataccccagttcataaatctttctgcagtatttctgcacctttactctgctgtcctcttcggagcagctcacatacgcaaacgctcgatccatatctcatctcctttcgacaggcatccttgtggatgccctaagtttctatcacgaaaaaaacggacatcctattggacatccacttcttctttcaatgcttctctcactctttccgttcccaattggaaataggcatctgtcacttcaattcccaccgcctggtatccctgctgggcagccgcaagaatcgtagtacctgctccggcaaaaggatctaagattcttccgcctggctcgcatatctgcaccacgtccttcatcaactgcagcggtttttctgtcacatgcacccggttctggggattcccatatcggaacacacctggaagacaggaaacgggacggctgattggcataggtccgttacttccccatatgataaactctgtctgctggcggaaccttcccttctgtggccggctgtttgtcttatcccagaccgctgttcctctccagatccaccccgcccattgaagagcatccgtcatcgatggatactgtctccaatcaataaaaaggcagatcggagcaccacttttacatgcttttctcacatcatacagccactctgccatccaatgggtccaggaacgctgatctttctggtcgccgtcaaaatctggcaaggctttttctggtgacatactgctgtatttctgattggttgtccggttcctttcattctgctttgtaccgcccgatgcgtagggcggatctgtgatcactgcatcaaaagttcccggttgaaacgcttttactaatttcagtgtatctccgtgtaagatcctccagttgtctcctccttcagactccacaggatacattccatctttcaatatttcccctaactgcagggtatgttccataggcatcatcctttctcttcaacgaattaaccgctttttcgagtttacttttctcttatcgctcccgattttttttcttttcatcgagacaacgtttcaattttttatctcttccactgtactcatagacatgatcacttaacatctgctggatacccatttcacggttcctttgtttcaacgcctctctaagatattttatcggcgcattctcggtttttcctacaatcaaaacttcatggatattggctgggatcacataaaaatccatacctgccattttccttaattgttctaacattcccggatatgtgatggcagtcgctccatttctcccttctctgtttgaaaggataaagtaagggaatctgccattcgtatctactggcatcaccacaggaggatttatttttatcgtattttccatggcctgcttcatcatggtgctttgactcacgccacaaacttccaatacatcccttcccagtcttgccataaccagctggttcttctgttccaatctaagatacagaaccaatgccccaataggctgcttttcgaaaattccatgagataaatgttctccgttgaactcagaacgttccagttctaccaccagcagatcttttatgcaatcataatctctgaaatcaattccttgcgtaccatctatctctgggatcatcataaatgcagtatttactgtatcttgtatagtttctataacttcttctatactttttttgttctgtgaaaaatcctgatacatctcctccatagagatacctggtacaacttccttgtcagacttattgatgatcaacatctcgccaagcccgtactctgtttgatccacaatagtgattacataaccttcttcttgtggcagaatcctttttgcctgttccatgatctgttgtttaaatacagcatattccataggtttacctttccctttctgttttcttttttccttgtttctccgactttggttgatccatatttctgctcagttccgtttccacgtattcgctgatgatcgcaagtgcctgctcataactttgggaagacgtgactctgtcaaacatctcttttgcggcttctggctgtccattctgttttaaaagcctgctggcatcacctaaaatagaaaaaacatttccatcatgtccaagcagttttaactttggttttattgcacattccggttttatctgctccggcatcttgtgcaggatatccatccggaaatagtcactattccagaaatgaacatttaaaacaccatcttctaccggaatatcctgttgttcaaatccttctccccagccatcggaatattgcccagtcagataagtttccagtcgattcatttcccatcgatctaagggcgcttggatggtaacttccgcacatcccataagttctccatcctttaagacaaccgacaactccagatttgtaactttttctttgacggaatccttttcatcgtaatattccatcagatcttctcctacatgatccgctctctcctgcatcttctgtagaatgtctgctccatatactgccagtgcacggccatccatcacgtcatccgggtacatccggtcactctcgttttcataaaattctgcctgtaatggtgataataaatatagttttcgttccatagagactcctacctttccattcgatttttttctttcttttcccatgcttcctttgacaggtctgcatagtctgccccttcacgctccggtaagtttatcaaaatctcatatctatcccgatatgttcttttcatagtttcacacgcatatctgcctggtccgtcattattggtacagatttcaatctgcgtaacctccggatggttctccagaaaatgttccaatgccagtggcggtttttcctctttttttcgcctgccatcttttggatcataaatccccccaacggacaagcgatatttatctgtacgatttccctccagcgtcatgtgtgctaaggtttcgattgccgcttcatataccgccactctgcaacacttcccacttggtggaacacaaaaactatatgctttatcacttcctgactgttccatcttaaagggtttcccccggtcatagattccccgcaggaaagcataccgggcttgtcctttttcatccctgccaacaaaaacaacattatgatatggcaggctttcatagagaatcccttggttcacacagtacacaaaagtttccctgctgattcccctgtgtttcagataattccagatacggttcacatccttcgcacgttctggaagagcaaatggcttctttgccatttcacgttcctgtatgttaggcggtatataagatgggttctgctccagcaaaaaaccaactgcatccagaaaagacatcccattcacatgaaccagaaaattcaatgcactgattcctccgatatccctggatttccaatgccactggctggtgatctcattgatcttgaagctgtcatgatcggtcagctcatattcatgtcgaagccctctgcatggtttcagccgctgtggttcatatcgttttaagtattcaatcgctgtcatttccctggccttttccaaatcttctttttcataccacggcattacaatagtgctgaccgtagtgcttctaccttatcggtacgttcccacggaaactcctttcttccaaaatgtccaaacaccgctgtttggctatagattggacgttgcagcttgaaatggtctatgatctgttttggcgtcaaaccaaacaccagcggaatggctgcagccagacagtcatccgcacacacaattccagtaccaaaagtatctacctgcaccatcacaggttctgccacaccaattgcataagcaagcgaaaccaaacacttttcagccaatccggcagccaccatgtttttggcaatataccttgccatatatgcccctgaacgatccacctttgttgcgtcttttccagaaaaggcaccgcctccatgtggcgctatgctaccataacagtccaccattaatttccttcctgtcagccccgtatctgcatccagaccgcccaccacaaatttccctgacggattgatcaaaatcctggtatcctcatctggtggaagcagccgcagtgccgggcgtaacactttctgccgaatctcccgttccagatcttttttggacttttcttcagcatgctggcaggacacaatgaccgtatccagacggacaggtttcccatcttcatattccacggttatctgtgctttcccatctggcagtaatccccggatatattcactgatcctgcaagccgacaattcccggacaatccgatgtgccagtaccacgggaagtggcagaaattgtttcgtttcactgcatgcataccccgtcatgactccctgatctccggctcccattttccattcttcgccagctacatgctgctttctggattccatggagttttgaacaccctgtgcgatatccgggctttgctgatggatcaaggcatcaaagaggatttctcctgcctggtatccgactttttctactacatcttcagcaaccgccaaaacatccggctcatacttacttgtaatttccccggccagaagtaccgttccctttgttgcaagtacctcacaggctactcttgcttctggatcccctttcaaacactcatccagaatactatctgcaatcagatcacagagtttatccggatgcccttctgttacagattccgctgtataaaatcgtttcatatctttttctcctttcagacaaaaacagcaggaacacgatacttaccgcattcctgctgtttatttttctcttttttaccccgcctttttacaggctggatttatgctgtttgttttttccgttctacttttataacacggataaatttccccatcaaagggaaataagtcaccagaaaaacgagaagtgcccccagaaacggaatcttccttttctcctttggaacactcaacccaatcatgactccgatggcacataagcagaatttaacgagtgccaaatccttccacgtacagttcttaatatatgcgtcagcataagaaaatagagacttcacgaacattcccccttgcattttcacacagaatctcctagttaatttcattatattccgtccgcctcaccaatacaagaattcccatctttaaatctcttttttctgccctacatcagaaagatcctggcgcttttttgcatgtaagaacagactacacacaggaagactcgtcaacaccctgttgcacttctccttgttttgaacacttcctgctggaagagaggatgagagatcatggatttcgaacacttctgggatacctttttttccagccggttttcctatttccccgaacagccgggaatttcccggctgttttgaaataccgctattgtttagttttcttctttttcatctgtttcctgctttttcttgcgataaacaaagcatccaatcagtattcctgcacaaaccgcacaaataccaagaagcagcattggtgataccgtatcatcccctgtttttggagcatctgttgggattctctgattggtcacatccagctccactaaaatctccccatccttttctccttctaaatcaaaggtaaccggatgtggcgtggaatccagctggtatccctctggagcctttgtctccacgacttcatactggaacagttctttgattcctttctcgttgtaacttccgatcagcagttcttcactttctgcctgcccgttctggtctgtcttaagaactccggccacttcattggtcgttttattccggatttcaaattctgcacctgcaagggcatccccgctttgaaggtctgtttttcttaaaaagatttttccatagacaaattcatttttcatggataccttctgtacttcacccgtatcctctaaagtaaacttcacatcctccgccagcatgtatccagaaattgtctgggtttcacgaagcgtcagttcttctcccactggcagatattcaatccgatgttctgttccatcagaaatccattcatccagcacttcttctttgctgtttaatacctgaagtttcacacctacaagctcggtatctccagtaatatccgttttgctgatatccacttttgaaaaatcatcctgcatttccacttttgtgatcgttccatcttctttaacctcaaaagacacatcctctgcacttacatatccatcctctaacggtggaagttcttcatgaaggaaatagtttcctgccggaagtgcatattccagatgttcttcctgggttgtgatccattcacggacaacggttccttcttcatccagaatctgcagttttgcaccttctaccggttcaccggttacaatatctgtctttgtaaaatagctttctgtcggctggttctctacttccttttccagaaggatagccggaagattctggtcttcatacgttgcatcaatttcccagatttcatcatttggcagatatcccggcagatgctgctcttcttttacataataatgtccatgccacaggtcactttcaaaggtaagtctgccttcctgatctgtcgcttttgtttcaagcagcgtatctttttccaccacaaccttgccctgcatatttttgatatcttccccggcatacaaaccaaacaccacaccctccagtgcttctttggttacggaatttttcttctccacagaaatttggattttctgccgctcattcttataagtaacaccttcataaacaacggatactgtgtcatcttctgcagaaagtgtgaactccttctgttcaggatttaagacaaaatggtcaccagctgtcgtttcttttaaataataacttcctaatggcaactctcctatttccgctttcccatcttcatctgtagtcagcgttgccacaagtgcatctttttcataacggatgatgcggtttccattctcatctacagctccgtctggcgtatagatggtttctttcgcatgaagttcaaaaacagctccttccacaccagattcctcatagataaacttcttttccagtccagattcaactgaaacttcccccataaccatatctttcaatgttacaaagaatttttttgctttttccagcaggttctcatctttgactgtttttagctgttctcctactttttgcaaagtaagatgacctgtctgcacctcattatactgtacgacttccacaatataagcgcctgtatccggatcgatctgatgaggcgtgtcggaattaatcacaatttcaatagcctttgtttgttcttcctcatacccttgtcttacatatccatccggtgcctggatttcttcaatccgataatgccctgcctttaattcttccggcaggatcagatatccgtctgcattggtggaaaactcagaaattttctctttctctggataatataccatttgttccacatatgcttttttctcaaaatcccaaatcttataagttgcagaattatttaatacattatggtctgtttccgcatctttctttatgatcttcagcatgaattcaaatgggcggtcatcaaagactctccattcctgcggatctctgctgtcttcgtttacagttaccaaaaacggatggacttgtttcagattttccggtgttttggtctctgcaaccacatactgtccatatggaagttccacgctcttggcatatccttttttatctgttacaaggacaggtacttctatttctttcccatcctcatatgtgactgccacttcttcgtctgtaaaatcataaccaataaaatcttccggggtaaattcagaaccatttcccggttttaaggtaccgtcttttactttggagagattgctgaccagatatatggtaaattctgctccctccactaaatctgtctccgtctgatctccatcctctgaaatcttaatgatctgaaacgcctgtttcttaactttttccttgacagtcagcgcctttactacaatcggtttttcctgtccttcataaataagcgttgcatcatattccgtttcgtccagaaggtatccttctggtgcagcgatttctttcacatacattgctccaaggtatacattctcaaatacgatttctccgctctttccaaaggttttttcctggatcaggcttcctgctttgtataaaactccagttccatctggtttctggatatcttctttcgcatacagcccgtaaacagcaccttctagttttgcatctccctgcggaaggaaatctcccgtatccacgtcctgtttcttaactgtaatcttgccttttaccggggtatttactgcttctacctctacacttgatccagcggacacatgaaccggatatacagtcttattgattgcatatccattaggcgctgtaatctcttttacataaacagtttctaatgctgcatcaaaatagtcactgtaactgataccgtcttcacctgtcatagcaatggtcaacagctggtccgtacaggtactgtttttataaacgccatagactgcaccatctaacgggttccctgtctccgcatcctttttcagaatcttaactctggcaagatttagccactggatatcaaaagataccggagctgctttttcagaaataaatgctccgatatcctgattgtttcctccggtggaagttaaaaccaatgttttccagctctcacggacagaaccataaagctgcccgctttcccatttcccagttaccgtaagaggtgcctgcaaataaaacgtatctcccccataaacttccagatttccgccgcttacatttgttccttttgacttgttatatccggttacaccctgtggaacaggaatggtaatcttattccgatggtcaccgttcaatgtaatatctggtgttttctggatatcaccttctcttactgcagtcacatttgcattggaaaaagacagctcaccttttggcggctcttccatgccaaataagtgattgatataagcaatcacacctgcattgaccaggttttcatacgggcatcctgtaaatgccagatccccacaataggcataagatgctgcaagatgggtataaacatacttttcgtcatcacttttcccggacaggtaactgcctgtgatatctccagctccaccatatccataataaagaactttctgaagattcttattactttccagaatatccgcaacatagtcaccagtaggcggtgatgcacggtgggattccagacagtacgccagttttccattcaccgtaaataagcatgtcagataattacctaaataatccggatagtaaatggtccgtcctttattcagatggactgtttcactttttcccataccatctgcagcagaaaacatcatcacatttccctcttcaatatctctttccagttctgcaaggacatccggggtatcttccggctgggaactggtaatctctacaggaagaggctgctccgagtcttcttcagaagacgtatcttccttctgtttctccccgccattagattccgagtgtgccagcccttccgtatccgtcaatgtaatggtccgtccaatcatatatggctcacttccatcttttggggtaaccagatactgtgcgtaataaacagctggtttttccggctggaaagagccgccatcctgatctttgatttcagacagcaggacactctcccgctctggatcataagaaatcccttccatagaagtttctacccggaactctttatctgagacatcttttacaatatcttctgctcttaccttctcttctggctgttcctcaaatacctgcgtttccgtttctacttttgtctccggctgttccgccgcagcataaacggatgaaggaatcatcgaactcattcccatagtaaaagccatgacaaatgccatggctctggtcttccattttcctttcataatcattctttctcctttatccttatcgtcccacttcccgattatgagactcttttttcttgtcttgcttcttcatttcttttctggtcgtatggacagctttttggatctcattttccgataatccattctgcctgcatccttccagaatcccttccagatataatttgcccggaagtgccggttggctctggtagggttcattcataatatatacagctgcataaagttcctgcccatcttcacactgcacaagaatatcctgttttccatatagatatggatatccttcatagtaatccaggcttttttcgcatttttctgtaatactccataacacacccgatacctgttccccttgctccggcaggatactggctactccatttcccctgctattcccccggaataccaagcggtaatctttcaccactacatttcctattacttctgcatccgggcatcgaaattccatttgatccagattcatgttgcttccatacgcaaaatacaaacgttctttgataactttccctcctttatcgctcttcctgctttctcttcagacattcataggtgttcttgtcatatctccatgctttgtccccttccagatgatccaataagtgtttccgcacattcttatattctggtccgatcaggccaagccgaagaagaaaggtccgaaaagtaaaacagggattttcagaaatctccgtctttctcatatgggtacatttctgattgatagcttgagcagaaattgctaaagcaagagtgatatttgcacgtacttttcctgcatggagggtactgttaaaacaccgccattccaccgttcccttatcaaacacagcatgcaggttcagcgcatagtacctggtatcatcatagtgactatgcgatcttcctcccattcttctttcctcataccacagctgacgaaatttatccatggacatattcccggaaggcattttccggatatcttctagcacattttcacggacttttttacaccattgttccacccggctggggtttacctgcaatgctttaaataaaatatcttctttggaatacatgatcgtgagcgcattctttaaacttcgtggtgtatgattggaggcatccacatgaacatgcattccacaggaggaattgacttttcccccatggcttcttaaacagcggacaacctgttgcagtttttccatttcgccatattccagtttcggactgaccatttctgtgctgtactcactatctgcataaacataacggtttccatttcttcgctgtgtatggatgctcccatcgtaggtaaacttccactcttttccttccagatctctgactccccaagtactgtagtaggttccgatataatatggctgtgttccaaacaattctcctactgcatttgctgcctcttctctggtaatccccgtcatttctatttcggttccaaagtattgttctttcagatccatcctgacaccaccttactgcagaacatggataccggaatgtacctgaaacaagcgtcttcctatggcttcgatcacattaacggttaccccgtttcctgcctgcttatatgcctgtgcatcagaattaagttccaggatcttgtcgatctgttcctcataatatccttgtaatctcaagcattcccgtggtgtcagtctccgaattcttccttcataacacaccccatgccggtcctgtgcagttaaagtgaacatttcttcctctggtgctttcatcctacgtccctgttgacggacgtttttcctttcgggtgtcaaaacagctcttggtccctcttcttccaatgctccggagcgttcccccagatgtttgtcactaaggctattctgccttgttgtgatacagcgtgccacttcggttacacgcagtctggaatccagatctacaaaatgcacggtcccctgggtactgcccgttgtcagcgtatgggcaacctgatgccccactcttccccgtcgggtattcatcccggcatatcccagatcaatgctgtcgccttcatatgccatcttataaccttttttggtattttccttaatggctaccccaacatcataaagccctgtttttcctcccatccctcctgcagtggaagtgatagtacagcttaatccgtctttggaataaactctgctcccttggcagcctgggacgatttgaacaagagccttcttgtttgctccggtgaaaggtaatatttttccggcacatctttcatcaagatatccgataagatacactctttttctggactgagggactccgaaatccttgctgttaagcacttgccattccacatgataccccagttcataaagcgtatataagatggtgttaaacgttgcgcctttgttatgcgataacaatccgggtacattttcaagtaaaagatacggaggtcgtcttgctttaaccagtctggcaatttcaaagaataaagttcctctggcatcttcaaaaccttgtctttttccagcaactgaaaaagcctggcacggaaatcctccgcacaagagatcaaactctggtagttcttctggtcgtattttttttgcgtcattacaaaaccactctccttctgtgttaaaaattgctcgataacttcggtctgcatacttatcgatttcgcaatgtccaacacaggaaaaaccaccagccctgttgagcccttcccgaaatccccctataccgctgaacatatcaaaaaatcgaatattttttctgaccactcccttcaacgaaaaaaagtacgggcatacccgcactttttatacagtttccttatttattctgtttcttcctctgattctgtctcttgcagacgctcttcattctcgaattccaattcttcaggctgtgttacatgaagttccggttcatcctcatcttgtttttccagttcatccgctgcatccagtgcctgggtgataatttcgatcagatagtctttctgagtgaaacgcccgcgtctttggcgtttctccttttctactctctcttttaagcggttgaataattcctcggatacttgtactgccaatgtttttgcttccatcttttccactccttttttcataaaatgctcttcgataaccttttgtaaaaactgaggaattgtcatttctgttccttccagttcttccctgaccttttcatgtaattctactggtatcttgccacagatgtttttggtttccatagaagtctttctcctttctttttgttacaaccaacatactccaaaggtcatcacaaagctattcacaatacctgacaaagaaatgctctgcaaacgaagcatattacatactcaagttttccctgctctcagtaggcatccctcccttcttttgccgcgctctatctatgcaagctcttatctttttctatctctttgtttcatccgcttgatctgctggcggacagcccgctccgcaagatccgtcatggtcacttcttttccaatccggttggattcttcttttgccagaaattccagctggtttacctggtcttccggtaacgttacaactaccattctgctcatggcatccctccttcccatgtgtttttcctattcctcctgcagcattgagataaaatccaatacctgatccggcagctcctccggctctgcagttgcgacagtttgtcgcatatcgccacattttagttcttctcgaacacttttccggatcagctgttccagtgcatctgcctggtcatagaataaaatcgcatccacaagaaactggcttttctctccttccggcactttctccagaatgctccatgcttttctatggtttcggtctttcctattaggccggaaagaaaataccggacgtttcatcgtttcaaaatctgccctgcaagcctttcaaatcctgcagcgtttaaacatacgtctggcagggtgataagccgacacaggcggtcctgggggcttacgttgcgttcaaaaagtcttgctccccctcccagaaatacagccggaactgcctgcagatcgaaaccggcctccatgatggcagacacgatccgcttcacatactgtctcccataagtaagtataatgttctttgcctcttcagagatgctgcagctctttccattcagaacacgttccacctgtacttctgtgatcgacaaaccagtatctctgcggacttgttccaaaatctcgtcttggcaacggatgactcccatttccagactcctgcaggttgctgcatttggaacaccattatccagtcgcataatgtcaatagtccaaccgccaatgtctaccaaaagaacagaaggttcatcccgaatgatctccgggtgcattgctacgacagaatagccctgtggaaacagtctgacatccaaaacccggatttcatagatttccccttcgtattcaaacactaccggattttttctttccagcaggtaatcccgaaaatttttcttttcccgtccgaaactggtaagcgggaggccagcggccagcaccacctccgctttccggggagccttccggaatcggatttcctgtgcgatagctgcaagtgtcaataaatagtactgctcattctcggtcttggtacgcaaaagcggctgtctccctgtaccgcacacataatatttcccttctatcttcaacactccacgattggtatagggttcatgttcatatcttacaatccctgatgggaaacaaatatgcgctgttttcatggcagaatagccatgatctactccaataatcatgcaattcctcctttttgcagacaaaaacaccgcccccgaaaggacggcatttcttcattactcttcttattcttttatcattgctaaaatatcttccatgccatattgataagctaactccccgtatctcagccactcggcattgagagcagagagataattatcaatgactataatgatttcttctgaaagccccatactacgcagttcttgttcatattgaaacacttcatccctttctttttgatattttggatcaaagcggaactccttttctgcttcttccaatcggaactgcctcatacattccaaaatttccttttttctttgttccggttccctttccttcgtttctgagatctcttttaataacttttggtaatggaacatatctgcttgtccaaagtaataatagtatgcccgttccagcatttcccggttagatgacagctcgctgtaggttttaaatacctggtattcctcatcatttaaagttaccccgttatttccatcaatcagttgtatgatagctggatacttttcacacagttctttcattcgcctggaatagtcttgataatctctattatatcttttcaaatagaacactacccgattatccaccatagactctaaagtccctgcccatgcttcttccggtgacagtttcataggcacatcctcctttccagcacaacaggataccatatttgtgccagaaagctattcacaatactacacaaagaatctgctctcttttgtagcaactatccagcttatttacattctgatttttcaaaagtaccctccctttcctgcatttgttttaccatccaatatcggattccaaacacatactcgcaaaaatcgtccagctgttttaacgtatattgatccaatgatatacgtttcatcttctcccatacttcatatcggtatctgggtaggtcagaaatataggtacagccaatacaatttttcattctttcaaacaaatcctgttctctcttttctatcagcagactatccccctttctccaaaagaaaaacagcctgtccaagctcatgctcattttaggctgcttcacatcatctcattttctttgtcaatatcatataaatcatcaatacagattttcgtattgacgatctgtatcactctggcggatgtatcgattcgggacaccatcccttttttctgcagatattctcctttgaagaaaaacactgccgtgactacatcatttttcttaatctgtcgaagtttccgatccagctcttcctggtactcttccggcagttctattttgggtactacgattttctctttttttcgaagcgcttctggataaccttttaaagcagcaaatggcataaattgttttgctcgatcttctcggttcatacgtcctctatgttccacttttatgccctcctatctgacggttcctttccatcgtagtggctcctgcctgcaggtccatccctttcaagatagcgtttttcccgaacttttctttaatatccaagattgcctcctgcatccgatgttcccgttctaattccgccggatctgtgaacaggtcatactgctgatactgctcatctaccacctggttaaaggttacagtcattcgccggacggaagtatacggatctacaatctgacaatataatttttccgtagccgcaataatttgtctggctgaactggtactattccgtaaccctatggttccgtgtgcaggcttcttctccagccggttactgtatcctacatgcagggtgatggaatctgtgaccaatcctttctccaccaattccagacaaagaagatcagccatctctttcaccacaagtttccctttttcaaaggtataatcgcactccaatacctgcccgctggaaagggaattggtctttggtctgtaagatttgatatcctgcatggtagtgctttccctgccccaggcgtgatcgatcagtaattctgcatctaccccaaacatccggtaaagcatgtcttcatctgcatgggcaatctctcccattgtccggatacctgactgctccagccgtttagcaatcccttttccgattctccaaaaatctgtcagcggcttatgattccacaaagtcttgcaataggattcttcatccaatatcccaatatgatcctctacatgctttgctgtgatatccagtgcaactttggccagatacagatttgttccaatcccagcagtcgcagtaatcccggtatgttcaagaatatctcccatgattcttacactcagttcttttgcagacatctgatacattgccagataatccgttacatccataaacacttcatcgatactgtaaacatggatgtcttctttggaaatatatttcagataaatcgcataaatctctgccgaataatcaatataaagctgcatccttggtggagccataatatattcgatccctttgggtatttcaaaaacccgacatcgacctggaacgcccagttttttcattgccggggaaactgcaagacagatagttttatctgacctttctggatctgctactacaagattcgtagtcataggatccaatcctctttcccggcattccacagatgcataaaaggatttcagatcaatacagacataggttctatccttttgcatgttccaacctcctccagattagtatccgcatttttcagttattttcattcagaaccggataaaataatccctaaaagaaatgttacattcgtccattgctgctacaaaatgaaactgttttaatatacttcttcttgcagttgcatattcctgtgctttcatcaaaactgcctgtacttcaaaatcctcatagatatgctctaagatcagagtaagcaattcattaagcatcttttcattttcatattccggtaatagatcgattctcaaaatcccaatcttagaaccatctgcagaatatttataagacggacagatctctaccattccagcaatttctttttgtttctgatctacaatggtaaaacgtacaaaatccctcacttggtatctgctttcccaaaacttcatacattctaaaaatttctcatagtctgtataataaaaatcatctccacagcagtcaccgttaaaatatcgggcagcctggggattactgtaacaccgaaataattcatgtgcatctttcatttccatctttcttatctcaaaacgatcagactggtaaatcggacagttttgaaaaacatcttttttcatttgaattcccctttctgttcttattagtttaacagaacgtatgttctttttcaacatgaatttattgtatcctttttccatatctatgaaaaaaagaccggccttacttaaccggtctttcatcacgttggctaactatttagttttcgtagtcttccaccaaattagggtaagattattttatgtcttgtaattcggtatcggacactttcttcatctattttcacctggtaattactaatttttcattagccaggttattgatgatttctgcttccgtaagtgttgcctttttttcattataggcatacactctattacaattcatttctatgtcaccatcagaattcaaagacatatcatccgaaaaatgtacaatgcgcaaaaaatttgctattggaagctcaacatttaatacttctattttttgataatgatacatcaaagcaatatatttttgtttaatcaaatcttcaatggaaccttgttcaatttgaatttgatctgacttaattgttattttgccaccactagttttaactactcccttttcaagcaaatcacaaatttcaaaaacattagtaatttcttcctcatctattgtttcaggaatattaaatcgtacattaaaatcattttctaactttctcaactttttataaaactttctcgtttctttcaagcatttttctgtttccttatcattcggcagcgaacctttcataacaattctatctttttctatatctctgccaacaacttcttctgaactatatattttttctagtaaattatataattctatcgttccagataccctacctgggattctttgatttatttgaatgcgcgttacaattcttaaaggatcagtacttgaaatctcaatttcaaagttagtaattaattgtccatcactaaattcatccagcatatgcgccacaatggagtcccctttattttctctttcaattttatatttcttatttggaaccagcacatctccttcttcattttctaattgtaattttatataatcaaattgcggcttaattaggactcgcatactttggaaattaaatttgtttaattctacctctcttacatatacaagtggaagatttatactaaagtctttataattttcatccttatactcttttattattttcccattatgattttcgattcgcatatgataaacttcgaattccgcttgttttccggtaaaccttagataagaaataaattcctcaaagctgtcaaaattgaattcgcttagtttaacttttatttttgtcgaaatacaaaaatagtcttcttgggtttttgctgcaagtttaatgctataatttccatcctgtattaattctatatcttcttctgaaagtgttcctgtatttattattctatttcctttttcttgagaaagtaatatctgctgaactccatccttaatttcatgcacatccctagaaagattttctttatcttcgattatcctttccatattattttgaagctttatgatttggtacctgttttcgtggatttctttaatgacacaatttttaagttttatattttcaggatctcttaattcattaaagctttcaaaagctttcttgctaatctgaattaaaattctttttatactttccctgttataaatacttattttaaaacttttcattatatcatttacaaattcttcgtctgttaatttatcatccgaagctaggttataacatctctccaataatttttcgatgtttttatcttggctcaaaatatcccataattcatcatatataatttcgtttccataatcttccaataattcttcttctaattttttttgatagttcttaataaataattccgttctctttgtttctatatgccctttcaccttttcttcaattgaagagcctacaagttcacttattttagcaattattcgttttgccaattttgcgcttataatggttgtacccatagtattctcctaaaatattccttataaatttagattgcagaataattttaccacattttaaaacaccaaaactatttttttatctttttgagagctattctacaacttcatatccatcccattgatttatgatatctctcaaaatatcatccatcttttctctgctctttctggtttctttagccatcaccttattactgattttcctatagtacgacacactatctgtattcttatgtcctaacaactcagcgattgtttcatctggtatatgtaattctgtaagcttaactccatagcagtgtctaaaaatatgtgtcttaggtgtaaatggtcttcctttatcatctcttaagtccagttctcgaattgctttttgtaaatgataagtcattgttgtatatgccatgggtttttctggatttttcttgcttacaaagacataatcttctacaccgtatttcttcttcgtatattcaattgatgcttgtacaagactttgaatttcttttgtgattggttttgaataagttctgccttttgtactgtcaatccgaatccagtaaatccccttcttttttgatatgcaatcctgttgtaatgttaatatttcagaaattctagttcataaaagtgtatgtaatagaaacgctcttcccacctgtttttccatataagggactgccttcatccaagcttcttgttctcttatcgaatatgtctgaaaactaattttcggactgcttggtatatctgtattaagcattagactagtaaactgcttatcttcataaatttttgagaactcttcaaatgctgcttttaaacctttcaattcttcagtaagatttttttgctttttactctctgtttttctatatataagatactcttctatgatatctctatctaactgatatattgtttgaacatcaggataaaattcaaatagatataatgaaaattttgtcattgcccaaacccgttgttgtacagtagataatgacaggtatctgatccagagaaggactgctctcttcatggcacaatgtatttgtaattgagtaattttagaaaaattaacgataaaattctttggtatcttttcactctgataaggcaactcaagttttcgaatgtcccacctggctttctcaatctctacgcgcatatcatgtttgaagctatatctgatgatatctttaaaattttccagcactatattgcaatccaccaagtctttatatccttttcttagataattataattcaatttacttatttgtgtttctgtacaccagtttttaaaatcatgaagtaattccgtataaggatagtctgccaatgcattaatcataggcttatgtgaaaaacaaaattccccgaaaaattcaatcatgattttttttcgttccatttcctgtatagacatatttctgtctcggaaataaatgtaattaatgatttcctgtcttaatgactcatattgaaatgaggagagatcataaaagctatcattctgaaagttcttctcttgtcctggatatatttccgaaaaaaatagtttgcttttcattccttattctccgcatattggataatctgtgtttcataacacacaataccgtattacacggagaatatctattcatcaaacttaccaattacccgccttcaaaactggcagatatattatttctctaatactatttttcttgtatacaaaaatctaaaataagaatatagattccaaatatttgcttttaaagggaaatcttttctatatttgaattttgtagcaaacggaatcttatgagcatcacaccatccagctatttctttcatattcgtagctgcccccgactctatcctttttaccaaacattgtttatttatctcgtccttccctctctgaaaagccaaataaaaacatacattatagtattttattaaaactatttctctcatatcatttacctttcttagaaagtttaagttgtccatgttcttgtgtatagcgtgtatatagtttatttttggggaatttttcgccctctatatactctatatacaggtgcaaattaccaccaggatcaatatcatttccacaacggataatccggtttccgcctgcatttctgccacaaacatctgcacccgttctctgatcgtttctctgaaattttttaacatcttattttctcctcctttaaatctgaattgtcaagaatgccggcactactatgatcatcaatacaactcccagcatcagaaacatgggacccaataatctggtacttgtttcttctcccagttttcttgccgcagccttccgctcttcaaatgcacctgctgcctctctttgaagcaattctgtcagcccctttgttccttttcttaaattctgagacaacatcactgcaaatttgcgatataccgggagtccgcaccgcatcccgaaatgttcgtaacattcactttccggagtacctctttgtaattcccgcatcgtgtagaccatttcttcatacacgtatcttgtattctcctgctgccgataggcagatgcaatttggatccacgcccttcgcaccggcatccctgcacccagatacaatgtaaatgtactgataaattcaggataatccattgccagctgatgtcttcgcgccttcttcttttgaatgctgttctgtttttcaagcatcagtatcaacactgctgccaccagtcccaaagcaaaaatcccgacacttctcatatcctttgcataattccacgataccgtttttcctccgatttcgtcaggaagaacgacatatcccgattccggatctgcttcatcgacttcttttattttcttttccagttgcctttgaaactgtcctgcatcatccagttttggtggaaatacccttgcagaaaaccggtgctctgcctgttcctctccatatgtaagcaacgctttcagttcaaggacagtcccttgttcccccagatttttatcttgtatctcaccaagaatattcatgacctgatagtcactcaattcccaggaaacttcaattcctgtatccggtactttgtgaaccagattcaaatccgaccgtacctcatccagacttttattttctccaaggaccagtgtttccagtttctttcctgccgcttcaaacgctttctgcaattcttcctgtgtatatgcctgctcctgtatcgccacggtaatttctgcttcttgatcttttgtctttgcaatcagcctttgacttttctccccttgtccatgttcatttcgctttaatataggattcccggatttattctgtggaatgttctgaaaattatctgatagatacaaaattcctgccagcactgtaaatataatcactaccagcaccgccttttgatatgcactttttcccattctcatatcgcttcttacacctcaatctgcgtcatttttttgcccaactgatacgcagccaaatacagcatcaggcaaattgtcataaacagcactcctgccggattcccatacaaaaccgccataaattccggaaaagcacttctcatatacaagatgatcacaaacggaatcacacacatgatctgaaactccagctttttggaagccagcatgacctgtatttccctttctacctccatcttctctccaattgcatccgcagcatgccggataattgcaatactatctcctccaagcctctttgcagcgccgaataccgctacaaaattctccacatcttccacctgcacacgataggaaaattgtttcatcacctcttctgcagtcatattcagatccagttgatgcatcatcgtttcatattcttttacaatccgtacttttttcttatatacggaacgaatttctttccacgtttcccgaattgcattttccacagaatatccaacttttagaattgcagacagtgtctgtatgctctcccgaaattgttctctgaattcttcctttttctttctgcagcattcctcttcccagctccttacatagagcagcatcacaggaaacatcaaaatccatgcaaaccagtgatcataaaacaaatatgctgtcatccccgtgatcagtattcctctccctactgccgctgcatattcctgtttccggatatcctgctgccaacaatttttctgtctgaacaatctcattttccttcataagagttcctttaatttttccatcttccatcccctcctcctgaaatttataaagtgtctgcagctgaatccttccttcttcataaccaagtacctccgtgatttccaatacttttctgcttttatcccgaagtcttcccagatgaataatgatatccagcgcagaagcaatctgtttctgaattgcagccaacggcaaatcaattcccatcagcatcattgtctccaacctgtgaagcatatccaaaggattgttggcatgtcctgtcgacattgatccgctgtgtccattaagcatggcggaagatatcatatctactgtttcgtctcctctgacttctcctacaatgatccgatccggacgcatacgaagcgccgacttgatcagatcacgaatcgtcactgccccttctccttccagattggcatttctggcctccagtctgaccagattcgaaacacccttgatctgcagctctgcattgtcttcaattgtaatgattcgttcgtcttttggaatataatctgataatgcatttagaaatgttgtctttccagagccagttcccccactgacaaagatattatattttgattccacaagaatttttaagaaatctgtcacttcctgactgatacttccccagtcgatcagctgccgcattgtaaccgcttctttcggaaatttccgaatcgtcataattggaccatttaatgccaccggccgcagcaccacattgacacgggaaccatcttccagtctggcatctacaattggagacgcctcattaacataacgattggctcctgccacaatctgctggatgacatcttccaattttgcagcagatacaaatcttcggtctgattcaaaaatgcgtcctgatttttccagaaaaatatgctctgtaccattgatcataatctctgtaatctcatcatcttctatcagttcctgcagaatatccagtttgcgaaatgcattgaacaactctctgctgatctgaatcttttcctgaagtggaataaatgtttcttttgaagcttcttccagcacttcatggatcaactcctgaagttcttcatcttccatatcgcaggtcatgtccatcttttcaatcacacggtcatagagccgttctgtatttctcatataactgtaccgccattttttgatcgaaccgtcttttgtacagtatgctccagaattttatcgtgtccggttcgcaaaagattttccgtatactgttgtaattttgcttttgctgcgggttcctcaatggaaagggtatgaacagaatcacatgtttccagaatagaaaacagtccattgacactgtctcccagatccagaatcaaaacctcataaatactcttctctaaaatctgttcaaatagctgcagccactcttttatcgttactgcctgtagatcctgcaccaccggaatcggaccgatataatccaaattgccgatctgcccggtcatcatactgatccgaagtcccagatttcctgtttcctgccttgcataatacagaagatcacccagattctgagtgttcccctcaggaaaataagaatcccctccggcatattcttctaaattcagatataaaaccggccctttttctgcaagttcttttcccaattctaacgcatactttgtcttcccaatcctgtgaaccggcgaataaaccccaatcatggttccccttgccttgtggattctcttttctgtatactgctttctatccagcgataaatccaatacctttgtcagtatctgatcaactgactgatacttataaagttccgtttcctcttctgccagattcctcccttcttctttcaccaacacaaatcgttcttctgccggaatctccaatctgtctttttgcggatattcttccccaatcagtaagatttgaattttctttttctctgcaaatttttttaattgctccattttttgaaacatatgcatttgaaatccaagctcttttcttcccccgatcatctgcataagatttcttgcataatttgcttcctgatcacaaatcacaaaatttttctgatgcaacctatccctcctgttctttatgattcattcaatcttttggatgaaaatactgctgcgatctgcagcctgaataaaataaatgacgaccagaatcctctctgatcctaatgatacaaaagacctgagaagcaggtctgatgaaacagcactcgaatgatctgctgtgtgaaatgtattataaacgcagttctctgtcttgtccatacgctttttctaaattgcagttttttgtgaaaaccttacaaactttgatatacaagaattccataaagcatacaaaccccaggaataccaaggcttccagatgtcaaaaaagaaagtccattaagtccaacctgccaggcattctgatccggaaggacatactgattgataaaatagatcaataccattcccatcactgcacgaagaaaaaaatgtaacactgcctctgccaccttgtttttcataacaaaaacacctcctgtggaaatctctgatatatcttattcccacaaaaggtgctttatgcacaagctataattttattttgatctcccgatcggaacggtgatactggtgatacctgactccggctgcatccatcatacgcttggatgccatcacactcggagtatccgcatatttatcgcagtcataaatcacttctttaatccctgactgaatgatcgctttcgcacattcattgcacggaaacagtgacacatacagtttcgctcccgacagacttccaccgctgtaatttaaaatagcattcagttcactatgtgtagagtacacatacttcgtctccagcggatcttcaccttctcgcgcccacggaaattcgtcatcggaacatcctttcggaaatccattgtatcccatggacaaaatcttattgtcctgacttacaatacagcatccgacctgagtattcggatccttggaacgcatccccgaaagcattgcaactcccataaaatactcatcccaggtcagataatcttctcttttatctgacatgattttcaactcctttattttgtgccgaaaatacggtctcctgcatctcccaatccaggtacaatgtacccgtgatcatttaaatggtcatccagtgccccgatgtacatatctacatcaggatgcgcctcctgcatcttctttacaccttccggtgcagcaaggatacacataaaacggatatgttttacgcctttatctttcagcatctggatcgcagccacactggatccacctgttgccagcattggatctactacaaacacttctctctcactgcagtctgcaggaagtttgcagtaatattctactgggtctaatgtttccggatcacggtaaagaccgatgtgccctacttttgcagccggaatcagtgacagcattccgtctaccataccaagtcctgccctcaagatcggtacaactgccagtttctttcctgtcagctcttttcccaccatctcacagatcggtgtcttaattgtcacatcctgaagctttaaatctcttgtcgcttcataacacatcagactggcgatctcactgatcacttctctgaattcttttgttccgacatcttctctgcggatatagctgattttgtgctggatcaatggatgatccataacatgtacttctgacattattgtcctcctttagtaaatgaatttaaaacttttgccaatttctctatcaacaacgtaatcgtctcacaacactctccatatgctgtcaaaggctgtccatatggatccggaatctctcgcatctctcccgtaaattcagtgagtgtatatacattgtctgtatattcattcggatattcagaaagaatcttttccttttgcgcctgccccatagtcaggatcagtgtttccggattcaggtttttctccgtaaacggtctggacgtgtatccttccaacgtcatctgattgctctttaaaattgcctctgctttctgatttaccggctctggaaacaaaacgaccattcccttggattcgatccaatactcctgctccaatgactggtgtctgaggatttctgctgcaaccggtccccgacaggtatccgtattgctgacaaaaacaatttttctgtatttttgctcttttgtaagcatcgatgcgggaattctgcaatgtcctgctgccttttccaggcggttcatgattgcattgccaatcccctggattgcaaatgattcactgtaaatctctgtgacatcttcctcgtcaaactctctcaaaatacgatacagatttcttgcgattgtcttctcattttcacgggaaccaatatttttcaccaaaccatgtgtgtagaagtccaccgtctcattcgtaccaataatccctgcctgtacaccttgccggcttttttcataggcaagctgacgaattgcaaacacttcctctttcagacttccttccacaatcgtcaattttgccttcggtgcatagtggcggtatttcattcccggtgccttcggagcctgattgctctcactgcccaggatcgtctcatccacactgaccacaccgattactttctccagcatatctgctgtaatcgcacctggtcttaagatcatcggcggagaaaccgtcatatccagaatcgtagattccaatccgatgtcaacgcttccgccgtccagaatcatctctatctttccgttgagatcttcccacacatgctctgctgtagtcggacttggacgtccggatgtattcgcacttggcgcagatacatacccacctgcagccagaatcagcttctgtgcgatcagatcacttggcatccgcactgcaactgtatccagtcctcctgttgtaccataaggaaccagtgcacttttttgaaaaatcatcgtaagcggtcccggccagaaatgctttgcaagcaattctgtctccggaggcacgttttccgtaatctcacctaaatcctccatatctgcaatgtgaacgatcaatggattatcagacgggcgtccttttgcttcatatgtctttttggctgcctcctcatccagtgcatttgcccccaatccataaactgtctctgtcgggaatgcaacaagtcccccttctctgagaatttctcctgcttctcgtattgcatcttcatctatttggtttttgtctattttcttaattatcgtttccatagcttttattataacatttttccgatcagcgctcaacatatttcaggattccattcccgattgcttccgcgagtttttgctgatactccccgtcaatcagcattcctgcctctgccggactgcttaaaaagccacactctacaatcacgatcggcgactttgtgtttttcagcatgtaatatgtagtatttcccttgatttctctggcatactctccggcaaaatcttccagttctgtctgcatcacttctgctgcctttttcgcttcctgtgagtgtgcaaaataaaaaatctgcggtcccctcacactctcctgtggataactgttttgatgaatgcatactgcaagcacaggcgcttgtttatcgatcagctccactctggctttcagatcctccacctgggaatctgccaaccgttcgtctgatgtccgtgtcatcactacttttatctgatagtcttccagatatttctttagtttttcagcaatctgcaaattcaattctttttcctgtgctccattgatgccgattttgccgggatctgtccctccgtgtccagaatcaatcacgactgtttttttctctgccactgctcctgctgtctctgttgctttctcttgaatatactgtgtgcgcagatattctcccgccatctgacatcccactgctgccgcagcaagcacacagatcatgatcagcagccgaatttttgtctgcagtatcccgaatgctttttttaattgcaaaaaaacatcccccttcgcctatattctgtttcatatatatgcgaaaagaggatgtttcatccacctgtatctttttataaagcgttggctgccagatatccttcttctaccgcacgattgatatctgccgctctttcatgacaatctcccacaaaatccacgggtattccttttgtctccagttcctccacgtcaaacggatttggctttgctcccactgcaagcacaacataatcacaaggaatcgaaacttttccatctgtattttgcgcttctacactttccggcgtaattgctgttacctttgtaccggtcaaaagctgtacatgatatttctcaaaactttcaaacaatactggtttgaccgttctggattcttcttttgcaatttcttccagcatctcaactaccgtcacctgacatcctctctctgccagaagttctgctgtttccgcaccaaccaggcctccaccgattacgaccacacgtccgcttggaagctcttcgtgattcaataccttccatgcatcaaatacatgcggcattttacttccttcaattggcgggatcacattatgtgctccaactgccgcgattacatgatctggattttctgcaagaatcatctctgcatctgcttcttttccaagacgtaaatctaccttcagtgctttcatttcatttgccagataatggagtgcacgattcatctctgattttctcggcggaacggatgcgatgttgatctggcctccaagtgctgtctctttttcaaacaataccacttcatgacctttgacactggcaactcttgctgcctccatgccggcagctccaccgccgactactactacttttttcttctcattggcaggagtgatcattctctcatactcatagccattttctgcattgagcacacagcttaagaacttgcgattctgaattgcatccgtacaccctttgttgcacatgatacaatgacgaatgcgtcttccctctcctgcttccagtttcttcacgtaatccggatctgccagcagagaacggccaagaccgacaatatcacagacaccattttcaatcagcgcttctgcgttttccggtgtcacgattcgtcctacggaagataccggaatcgaaacgacctctttgatctgtttggtatattttgtcataaagcagtaaggctgtgttcccatagctggaatcgtgtcattcatatttcccgtatgatttgcctgtccgacatgaatcatatctactcctgacttttccaggattttcgcaaattccactgcttcatcgatcatcagtccgccttttccgcgcagtgggttttctgtaacaaccggaagtttataatcgatgcagatatccggcgccacttctctgatccgctctactacacgcagtgcaaatcggattctgttctcaaaacttcccccataagaatctgttctgcgattcagcaatgtggaacaaaaagatccgatcaaacgatctccatggacttctatgatatccactcccgcttcctgtgcacgcctcacacattccccaatcttatccaaaatttcatttaactgctcttctgtcacttcctgaataaaatgtaccatgtcatgacgcatctttgctcgtccgccctccatgtcccctttccggaacaattcagccagtgcctctacatcatactccggatgaaaaatctgaatgcccagcttacaatcaaattcatgaactgcatctgccagttttttaaacgcttctatctgtccgtcatggaacagttttggtgtcggtgaaattgtatttaccggtgccacatctcccagcacaatataagctgtcccaccttctgccagccttttgtagaaattaaagctctgttctacaattgtgccgtctcttccctcatatcctgttgtcatcggcggaaacatcactctgtttttcaactcgatctttcctactttgataggttctaatagtctcataatcagcctctccttactattctctctctgtttttatatatattctactatacacatcctcacttttcttttatatgctgatcatgctttcttcctatcactttcctgctattttataatttcgattgaatcctgatatgcgatatattatgataaatacatcagataaaaggaggcattccatgcagcttgaaatagaaaatattcatcatcctcagattaaaaatatgaatctgacagtttctgatgtcggttatcgtgccacccacctgcatcctgaaatagaattaatccttgttttaaaaggtgatcctacattcaacatcaacggcaataccatgtcctgttccgaaaaagatattgtcctgatcaatgccaatgaactgcacgaaatcatctcagaaaaaacgccgtctacacttctgtccctgcatatcctccctcaatatttcgaaggatactttccgcagatgacttatatcagctttcttgaaaacacacttttaagcaaaaatgaacgtttatttacttacacattctgtaaactcttaaaagtttatctctcacaagcgccttattaccagttggagtgtgccggtctgatcaacatcatggtacacgatatcctgcaaagctgcgcttattatgaaatgtacgaagatacgcttgctctcaccacaaagcgaaacagccagctttctgagatcatccgctacatcgaagaacattctgctgaacgggtaaccttgtctgctctggctgaacatatgcaattgtccacctcctacctgtcacatttcattcagaagaatctgcatcgctctttcagcgaatttttaacctatacccgatatttaaatgccaaggcactgctcatgaaaggagagctttctctgatcgatatttgttatgggtgtggattctctgactatcgttatatgaacaacgctttcaaaaaatatactggatatacacccaacgaatttaaaaagacaatcaaatgcaatgcccttccgcacaacaaaaagggaactgtaaaatcatacactccacaagaaatgatggacactgtcacccattttatggaaaataaccactttgacgaacatcagatttaaaaaagagacgctgaaattccaaatcatataatatgcttagaatttcagcgtcctttttatattcttttattcacttttaattgacatactgcaagatcagatcccaaatctccgaattctcccagccaagccgccattcggccactccggcaagctcattcttttgaatcagtttcagcttctcttccaatgactgactatcttccagccagatcttatatgttcctccatccgcatcccactgtgcataattctgtctcgtattttcatcccaggatacctgcgcgcctgcttcctcaatgcgctttctggcatcatccattccaagtgctgtactggtcactttatttggataatcggccgcttctgtacctgcttctgccgccagctcttcctgtgtcttcggcgtctcaaaccacagtcttgtatacagtggaattgcattgaccagcttttcattcggaacaactttcaatgcattctctatcccatctttgacataatcataagacgcaacagatcctgcttcataagaaccttccacgtgttcgtcatatcccatgatcacaacaaaatcagcaaacactgactgttctgacagatcataaaacgtgttatatggcatcggcacatagttgtctacggaaaataccagcccattctgatgacacttaacagaaagctctcttacaaactgtacataatcttctccgcactctgcagaaatcagttcaaaatccagattgatcccatcaatccccgcctgcaaagccgcagctataacctgatcgatcaggttcgttcttttggaagtataacttaatacttcataagtctcctccgcagaattgattcccccatgaaaatctctgagaacagcccacacctccagattggactgatgtgcgtaattcacatactccgcatctgcaattgaatttagatttccctgtgtatctgcaatatgaaaccaggttggtgcaagtgtggtcagcccctttgtcgatgcaagcatatcttgtatatatccattggcaatcgtattctctacattatgccatgccatattgatcgtatagtctttggatatgcctgtatattgtggctcttcaaagctgccggaaatcgtctcttctttcatatgtttcagtgaattcgtctgcacatatccgataaacccatcactggtacgaactttcttccaatcatcttcatcctcgaccacagttaccttctcggactttttcacttccgttaaaatcggacttttcacgccgccctggaagcgaacttccgtatcccgtttcatctctgccacagttgtctttccaaattcattcacaatcattacacgatccggctttttatattctttgtattccatgttcgtgtacttcttgataaaatccaaggcaatatatgctttcttatcaactgtctgccagatgatatattcttcccttttttgttcactgacttccgtatattcctgacttcctgcgtttacaaaaacattcccctgcggcaatgtatacagcaacagattctcattcgcatcccaataaaaccgcttattgataaaatcatgcaaaacagaatattcaatgtaggcctgtccatcgatcagacggcctcctgagccatacgctccatctgcttttgcaatcacctgattattcacgattactgcgatatcatctgcactcgtcattccataatattgtttcaaatctgctttctcattcgatgagccatatcgcttccagaaaatcaggcctccgacagcggccatgatcagcaggatcagaatcgctgttctgatcatcatatttctccgtcttcttctggccctgcggctctttcttctgttttccgacgccggtctgcgtctggaatctatccgtgtatcccctggttcttcggcaatcctgcgtgggcgccttttcgttttatttcgctgtgtttccgacataccacgggttctcacagccctctcttctctttcgtccatgcctacctcctatacagaaccattataacatactttttttaccagtcattactaatttgccattttaagaagtattttaaacattcttcagaaatattttaaaaatctttttgtccgcgtaaaaggggatctacgcctgctcatttctattgatatttacaaaggaaagtgattcgatatatccttctgtatccaaaatataatcccgcatataactgccctcttctcttgtcatatgtgctgttacgatctgcatcggactggcaggaaatccatccatactaatatagatccctttatgttcataccgttccagttcctcaagcaattcctgataagctgtctcatcagatttcatgtgcttctcctttccctctgtgagttctgataaatatcccggtaataactgaccgcagaaggtatgtgacgtaccctgaatcatacacggtacaaaagatagcatgaactcacatcgaatttacttttctgtctgatattgattttgtccccgattcgggaacttcgaattttgaatattttaatgatagatatgctctttgatgtcttaataaatgaaaaattcagtaactcgtttcagatgatctgatcctctcttctgtatccctccttcttgtataagtgatatttatcccgaacactatcttctgtactgccaattataaggattgtctctttgtatttcaatgtgttttttgttcataactacttcccttttgttgataacacgaaataataaaaagtctctctatttttctttacatcttttttctttttgtttatactaatagtgaagaaatatatgttattattttcctacttaataactatatttttcaacatttcaattcgtaaggatgtgagcacatgaaaatcgaaaaactgaatgataatcaaattcgttgtacattgacacatgctgatttagcagcccgtcacttaaaactgagtgaactggcttacggtacggaaaaagcaaaatctctctttcgggatatgatgcagcaggcatcctttgattttggatttgaggcggaagatttacctttgatgatcgaagcaatcccttcatccggtgactctatcgttctgatcattacaaaagtagaggatcccgaagaactggatacaagattctctaaatttacacaaggcatggattccgaagccaatgcagcggaacagctggaaaagctggaaggcgctgaggacttcctgaatctgctcaataaagtaaaagaagcggcagctgacatcaaacctgcatccaaaccacaggaagaacccgcaccgctcaatgtacgtctgttctcgttcagtcatattgatctggccatccaggcagcccatcttctggcgcctgcctaccatggatccaatacgctgtatcgagataatgaggcagatatgtatattctggcactgaccccatcggatcattctgccaatgaatttaataagatctgcaatatgctttctgagtatggcagtctggagaaagcctccgcatctgttcttgcatttctggaagaacattgtgaagtggtgatttcttccgatgctatccaaaagctttcacaagtataagtacaaaaaaagagtgtgaactgaacatcaccattcagtccacactctttttatattctgattcttattttgctgctgctcttgctgcattgatcttttctactaaaagatctgcatcgattccatgaaccattgcagcctctcccagtgtctccatctgtgcggatggacatccaagacagtgcattccgatttccattaagatcggcgcacattcaggatatactgctaacaattcgccgattgttgtattctttgtaaatgtttccatttttgtttcctccttctattattcagtgttttttattataatccctattttttaaattatcaaccagaaaacctgaaaatacagtttaaaatctgccatgttttccttgaattttctgaattgttttcttcattttctttgcttttcgaatactcaaaagtcaatatctttttccttttttttcgacaaactatgaatttcataataactttacaaaacatttgttctttttttcacaaaagtaattcacaaaaaacacctgtttgagtgtggataatgtgaataacttttgtgaaatatcgtgttttccacgattttttagattttgagtgtggataagttgaaaactcatctttttatgatttcgacatttttttacatttttgtgcatcttgccatttattcattttcctgttgacttttttgtttctccctatctcgtttttctcaaaaaaataccgcatcttaaagtcagtcaactttaaaatgcggtttgattttacagaactcttctgattgttacaattgttgtgtacgttgcactgcagattccaattccgtctgcttcattcattgcatttacgattgtaccgtcccccatgtataatccaacatgaccatcatacaaaacgatatctcctggaagagcctgttcataactgaccgggacgcctacgctttccatatcccatgttgtccttggcaggctgaccccgaaatgtgcatacacagactgtacaaatccggagcaatccgctccttctgtcaggctggttcctccccatacatatggatttccaataaactgacaggcataatctatgacagcctgtcctaaagacttctgatcctgggatgagacctctgcaacctgctgctcctgaatacctgcctcttcttcctctctggttactgcataagaatatgtggtctctatctcaatatactccccggatacccagccggcgatctcccctgcctgcaccggataccatccatcttttgccgccccggtaatctcatactgctgtccctgaaatatctgggtcaatacttcttgttcaactccctgaccagctctcacattcaaaacatcagccgttaccaatgcagcctgtttttcatattctcctgcatgctgccttgcatcatctcccagatataatgtatctgtgggaacaaatccctgcacatttcctgattggattttcacccaatcctcctgatattcgagaacacttgcggctgaatccggatataattttccgatccaatcactgttctcatccggcgtacttcttatataagtgaatgattcacctaaattggaaaacgccatattcaaacactcaccctctctggtctgtaccagataaaactgtaaattatcttttacatttgtttcatagcagtctgtcactactgcttcgattcctgctgtcggtgaaaccggatatacttctttattctgatccgctgcacagaccgcactccccggaatcatcatcattcctaaaatagccggaatgattattttttgcttcatgtgtgctgtcttcatataaaacctcctttgttttctgtctttatcttttgtaggaagttttaaatgttacataattattaaatttattacattttgattatatcaacaggtatgccgtatgtcaacatttttaaagcgtttttttcttttgtatttcgacatatcacgatatattatttctatttttattgtatttattaacttttttgtaatattttatcaaaaaacagcacagccttatattgaatataaggtctgtgccgctttatgcatattctcttttattcacttttttcttttcgctgtctgatctcacttacaattttattgtaattctttttattcagccgataaaagaacagtacaaccgctgttatgacccacaaaattccgggaatggtcgtaaatgaatgctctatgataccaagaaccgccggattttgttcctgatttgccacatatccacaggctcccagagctgctgccaaaagcgaagtaccaacagccataccgactttattcccaagcgaaataaacgcatattgaaatccatcattgcgaaggcctgttttccattctccgtattctacgcaatccggaataatcgcgtagatcgcggtgttaaacccggagaaaaagaattgtgaaagacaggatagcgtataaaaccataccggtgattctgttgccttaaagaaatacatacaaaacatgctgattcccgtcaacaaagcaaatatagaagccgaacgtcctttattatttgtcagtcggaatacgatcgggaaacaggctgctcctataatggatggaataatgataaaaagagaatacacactaaacagtgctttatctccctctacatatgtaaaataatacaatgcatctgcatttcttccatacaatgtaattccaaaaagaagctgtcctgccactgcgatcagatatggtttattttttcccaccgcctgcagctgtgtctttaacgatatttttttcttttccggaatcggaaccacttctttggtttttgcaaaacaaaacagatgacaggctgcaaaaatacatccatacaagattgcaatcaaaaggtagccctttttttcattaccgcttcccagtttcgcgatcaatggaaccgtgataatattaatcaccccaattgcaatcatcgcactgaccgaacgaaaggtattgatctttgctctttcctctatgttttgtgtcattgccccacacaacgttccataaggaatgtttacacatgtgtatccgagtactaaaatgcaatacgttattgccatgtagatgatttttgatgtgtccgaccagtccggatgtgcccagaatgtcagaatcaggatgatcgccgtcaatggagctgcaatcaaaagccatgggcggtaccgtccccatctggaatgtgtcttatcactcaatcctccgatcacaggatcattaacagcatcccaaaatctggaaaataacatcagtcctgccaccgcactcattccgattccgaacacatccgtatagaaaatcattaaaaaatttcccacgaacatccaactgaaattacagcctacatctcccatgccatatgcaattttactgatcaacggtactttgacatttgtttttttattttccatattctttctccatctataacaatctcttaactggtttctccgattttaatcactgcttttacaacatcagatttattacttacactgtaatccattgccttttgtacgtcatccaaactgaagatatctgtcacgattcctttcagattcacttttcctgacgcaaccgcttcgattgccatcggataaatatgacggtaacggaacactgtcttaaatgtaagttctttatccaaaacaagactcatgggcagtgtcatctctccgctcttgctgtatcccactaatacaattgcagatcctttctttgtcatgtggattgcctgtactgttgtaatctgcgttcctgctgtttcaaccgcaagatcacatccttttccttctgtcagtttcatcactgtttccactgcatctacttcacttccattgattactccatctgcccccagttccattgctttatccaaacgcttctgcatgatatccactacatatactcttgaaacacccatcgcctttaatgccatcatggtaaccagtccgatacatccggctcccataacgaccgctgtctgtcctgcttttgcctctccctgcatcgctgcatgaaatccgaccgccagtggttctatgagcgctccttccattgtacttacatgatccggcagtttgaaacaaagatctgcttcatgtgccacatactcctgaaatactccatccacaggcggcgttgcaaaaaatacaacatccgggcataaattataacgtcctgttttacaaaattcgcaatgtccacacgtttttcccggctccagcgccacgcgatctcctactttcaaatgttttacattctttccggtctctaccacaactcctcccggctcatgtcccagaacaaatggaggatttaccgcataatctccgatcgccccggtttcataataatgaagatcacttccacagattcccacatattccaacctgactaacacttcattgtcctttacttccggaatatcacgttcctcaaatcccattttcccgattcctagcataactgcaactttcatttttcccttcataaccttacctcctgttttcttttttatatactttattaaatagttttattatgtgtctttatattaggctggcacttgtattttgtcaacagattttcagatttctccattgctttctccgttatatacaaatctttctctactcatttgttcaatatcaccataaaaaaagagatctccaaacactgaaaatctcttctgcttctatattctctattagactagcgcaataaagtcttcgattacttttaatgcagctcccagagcagctgtttctattttataactgcaagccctgataaataaacgttcttcttcaaatgtatttctcttttttaccttctcccatatttccggtatatatggctccagatatccccctgcatatcccccaagtatgatgtcacagtcaagaaccatatgaatattattcactccgattgccagataagacgtatactgatcccatacctcttttgcgtctgggtctttctgctttaatttttcaaaaaattgttccagttttccattcattttacctgataatatttttgccgaacaatatgcatccagacagcccttttttccgcagtaacagagctttccgtcaggaacaattgtcatatgcccgacttctccacatcggaatgctttcccctgctgcagtttgctctcatttagaatggcccctccaactgtattactcaaagacaaatagaaaaatctttcgtcctccttcatacggattccctctgccagtgccccggcattcgcatcattaaaaaaactgcatggatacgcaaaaaaacgacttacttctgccagtggtaaattttgaacttccagaatatgagaatacgtgatcatctgtttttccagatctacaattcccggaaaagaaataccgattcctgaaattttttcccggttcactccactttcttccagaaactgttccatcttttcattcacagcataaaaatacacttcttctgttctgtatgcctggacaatccgatcgtattttaaaatctctccggtcaaatttgtcaaaagtaatccgatgtgatttttggtgatatccaatccaatcgcaaagcaggcatctttcttgacagataatgctttcgctcttcttcctcctgtagactccaattctccgacctcttcgatcaagcctttttctatcagctctttcgtattttgtgttactgtcggcaaactaagctttaatgcatatgaaatatccggattagaaaccttatcatgtccgcacacaaaacggaaaatttgatttctattattcttttttacctccatattggtagcttttctttttgtcataatatgacaccccactttataaaagtattttttttagtgtaacattaacttgttccaagttcaaacctaatttttcaaattctttttcaaaatcctattgacaaacttcaaaaactatattatagtctaaacatagcaacgattactattattgttttgaaaggagaactcacttggctactttgaaatacagcagacagcgagagtccatcaaaaactatttggcatcgaccactgagcatccgactgctgatacggtctatatgcatgtcaaagaggagtttccgaatatcagtcttggaactgtttacaggaatctgaatctgctgactgatctcggtgaggcagtcaagatcacaactcctgacggcggggacagatttgacggagatgtccgacctcacaatcactttttctgcacttgctgcaaaagagtcctggatatcgacatggatatgcaaaatgtcgctgatctaaatgaaattgctgctaaaaactttgatggaattatcgatttctgcactacaactttttatggaaaatgtggaaattgcatcaaaaaatcttaattttaatcataatatggaaagttttctgattccgtattataatattaaccaaagaccgactcattccggtcaaatttatcaagaaaaggagatttgaattatgaaaaaatttgtttgtacagtatgtggttatgttcacgaaggagacgctgcaccagctgaatgtccagtatgtcatgcaccagctgataaattcaaagagcagacaggagaaagatcttgggctgcagagcacgtagtaggtgttgctcagggcgtaagcgaagacattcttgctgacttaagagcaaacttcgaaggagaatgtacagaagttggtatgtaccttgctatggctagagttgctcatagagaaggatacccggagatcggattatactgggaaaaagctgcatgggaagaagcagagcacgcttctaaattcgctgaattattaggcgaagttgtaacagacagcacaaagaaaaaccttgagatgagagttgacgctgaaaacggagctacagctggtaaatttgaccttgcaaaacgtgcaaaagctgcaaacctggatgcaatccacgatacagtacacgaaatggcaagagacgaagctcgtcacggaaaagctttcgaaggactgttaaagagatactttggataagatttcccatcttatgtagaatagaattgttaaagaggcctggtcttgatcagcgcctctttttcttttctggacatctgtttaattgcatattctcttttcatcgcttcttctcttgtctgaaactcttcataataaacaagttctacgggccttctcgcttttgtatactttgcaccttttccttcattatgagttataagacgtttttcaagattgtttgtccatcctgtatacagagaatcatctctgcactttaaaatatatgtataattcattttcatcacctctttatcaagtttttattttactctttttccccacaaaaaatcaagctgccatgacaaaatcaagggatacgaaatgttcctttttcgcaccccctgattcttattccatatatactgccggatctttcggttctccgtcttttgtcacctcaaaataaagattaggtccttctacactgtaatactttgtcggttcacttaaatatccgacaacctgtccttttgctacaaagttccccacttccaatggcacgtctttgagttgtccataaacagcgctatatccatttcccatgtccattgtcactgtcatacccgtctgcgcagactcttcaatattcgttacgatcccgtctgctgaagctcctatcatctctccgacttctcctgcaattatcatagccggattatatttgtactgttccaatgtctgaaaaaatacggttttatccatgctgtatcccaaaatcacgcttccgcttgccggccaggcaagtgtactgtcttcatcaaaatacaccttttttactgccgcccctgtttccgtcggtgttcctgtactttcctgtacgtctgtttctgattcattttctgctgatgtatcttcctcgacctgcggaaggacaatatcattggtattcgttgttctggtttcttctgtaactgtgttgttctttgcaagctgacttcccattgctcttcgatgatagctgttgtacacaaccgctcccacgacagataccacaacgacgaaacagattacaatcgcaactgacattcctttgctttttaaggaaggcttttcattgttattcatattcatcacctctggctatatttttaccagaagcatctctgtttattctgcttttcccaaaatttcttctgaaactgcaatcgatgtcccctcaaaaaagaattccagaatttcctggtaattctttccctcttttgccatctcatttgccgtccactggctcatccccaaaccatgaccttttcccattgttgtaattttcaatccatttgaatcttcctgaatagaaaatgcactggatgcaagagacagcgcatcccgaaattcatccccgctgcagactgtatttccaattcgaaatttagatacatatcccgcagaatctttttcctggatctcaaaatcttcaaattttaatgctctttgggcttctgcctctccctttgctgcctccaaaaacggttgacacattttcttgatttcatcatatgaaaactgatacacatgcatttcatcttccgcctccacatcttccgggcactctctcactgcaagatatggatatgtatcctcacccattacttcttttccacttcttgttttcccattgctggactgatgatacggtgtccatgcataagtatcctgatacatgagaacctgcagttctgtttcttcctgcacttctcttagtttctgatcatactgtccaaatttttctgcaccccattttttcttcaattcttcagatgtcagatacgcttcttgaaataccattgttttcccttctgctcctgcagcttgttgatacaatgtagtctgaagcacaactgcctgtgctttcaaagcctctttttcgtaagatatcggcattgtttttcctaaaattcccatgatatattctgaccagggaacggttctgatcgtatttttcccgtctttatttttgatttccacctgaacacagggctcctgcgacatccccagtacatcgatcccatttacaaacactgtgatcacatagggaagtagtaacaaaattgacaaaaacgcacttgctgcttttaatttttgatgttttcttctcataaaaaacctccatgatgcagtatatgcatcatggaggtctgatatccttttattgttctgcaggtggttctgcatctatctttggtccgtctttttcagtctcttcttttgtgtcaccatacgtataattgaatgccatctgctcatgttccggttttggtggttcttccactcttcggtactctccctgaacgatctcatcctctacttttttaaattctccgtccaccggttcgtcttgattttgctctgcttctggatgtccttccggtttctgctccggctcttttggtatatgcgaagataccggaggcactggtgcgatcggaggaggcgttgtcagaaacggcgtcccaagatccggttcttttcccggattatacgggcgattccgcattacaaacagacaaatagattcatacagtggcagcagcactcccaaaaccgcatgtaccaccgccattcccggtgtagtaaatttttcatatatctgacgatttacaagaattcgcaataccttgtaacatgcattataaacaatgaaaaatactatggaaacaccaacaatcaccaggagtcctgcaactgctccaaagctaaaacttacattcgatgagaaaaatacaccaaatccaagaacaacccacatgatcacatacagcacgcctgtaacgatcgaagatataaatggcaatacgatcagccaaatccccggattcttgatctgcttatttttcagatgtacggttccgccaagttctccctgaaggtaggttctcgcaaatggcacaaatgccaaccacggataatccattccttctcgttttgccatatggtacattccaattccccggaaaatataattggtaaccgaaacaaccagtccaaccagcaatatgatcagataaatcatcaaaatacctgtcataatacttccgcccacattatgaacggaaggcgtatcatagtaaccaaaatcttcatatggtacttcgctgtaaaatcccataggttccctcctactcctcgatcggatctataaatactttctccagtttccagatatccttcacatactcttcaatcgttctgtcagaagagaattttccactgcatgcagtattcatcatcgccattttagaccatctgtccttatctttgtatgcttcttctactttcttctgtgcttctgcataggaacggaaatctttcaaaataaagtacgtatctgctctgtctgtacactgtgtattcaaaagtgagttatacagatccttgtacatctcatgatccccatttgcgtaggtaccatccatcagctgatctacaactcgcttaatctcccagtcattgaaataaatctctgtcggattgtatccgccgtaattttcataatggatgacttcttccgagctaagtccgaaaataaatgcattttcaattcctacttcatccacgatctctacgttggcaccatccatcgttcccagcgtcggtgcaccattgagcataaatttcatgtttccggtaccggatgcctctttggacgcagttgaaatctgctcgctgacatctgctgccgcaaataaaagttctgcattggatacacgataatcttcaataaatactacttttaatttgccattgatgcttctgtcattattcactacatctgccacggaattgatcagtttgatcgtctcttttgcccgtttatatccagctgccgcttttgcaccgaaaataaatgttctcggatagaagctcatctccggatgctctttgatctgattgtacagatacatcacatgcatgatgtttaacagctgacgtttgtattcatgcagacgtttgacctgcacatcaaaaatggacattggatctacatcgattccattgtgttttttgatataagctgccaggcggactttgttctggtatttgatctccataaactcttttctcgcctgctcgtcatctacatacgctttcagcttgctgatctgagaaagatccgtgatccatccatctccgatcttatctgtgatccagtctgaaagcagctgatttccgtgaagcaaaaatctcctctgagtaattccatttgtcttattattgaatttttccggcatcatctcatagaaatcttttaactcctggtgtttgaggatctctgtatgaagttttgcaacaccattgacagaatatcctgcaataatcgccatatgtgccattctcacctgtccattataaagaattgccatcttgcggatcttctcttcatttcccggatattttgcacgtacttcaatctggaatcttctgtcgatttcctgtacgatctgataaattcgcggaagcagtctggagaacagatcaatcggccatttttccagagcttctgacataatcgtatggtttgtgtatgcacaggtctttgttgttacatcccatgcttcctcccatgtcaacccttcctgatcaatcagaagacgcatcagttccggcactgccacagtcggatgtgtatcgttcatctgaatcgctactttttcataaagtttgcgtacatcactgtgtttcttcttatacttttcaagcattgtctgtaagcttgcagaaataaagaaatactgctgtttcaaacgaagttcttttcctgcataatgattatcattcggatataatacatctacgatcagttttgcgagattttcctgctctacagatttgtgatagtcacctctgtcaaatgcatccagctggaaatctgtaattgcttttgcatcccacacacgaagtgtgttgacgacatggtttccatatcctacgattggcatatcatatggaattgccagtacagattcgtagttttcctgtacgaaaatatcttttccagtctccggatctttgtcaaaatgtacacttcccccaaaacgtacttcttttgcatattcttcccggcgaagctcaaatggatttccttctttaagccagttatcaggtgtctctacctgataaccatttttaattttctgcttgaacattccatagcggtaacggattccacatccatatgccggatagttcaaagtggacaatgaatccagaaaacatgccgccagtcttcccagacctccatttccaagtgctgcatcaggctcttcgtcctctacaacattcagatcgatattcatctcttccagtgcttccttgacttctttgtatgctgtcatattaatcaggttattgccaagcgcacgtcccatcaggaactccatggacatataataaaccgtctttgcatccgcctcatcataggccttctgcgttgcgatccagtcgtccataataatatcttttacggcataggaaacggcttgaaacacctgctgtggggatgcctcatcgatattcttccgatacagagtcctcacattctccctgactgcctctttaaatatttccttctcaaaacgtttgctgtacatgcgattatctcccttccttttcgactcccatggaaacagcttctccattgatcttccattcctttacaaagcctgccggttctgctttttctgcagaaactgccagaacctcggagcagatctgtgcacaattatctgcaaagactgcctctgctttttcacttcctttgtaagttaccacgatcttatccatcacttcaaatccagcttcttttctcattgtctgaatcttactgatgagctctcttacaaagccttcctctaaaagctcctctgtcagatttgtatccaaaacaactgtaattccgttgtcattctcagaaacatagccttcgatctgcgccgtatcaatcagcagatcttccttgaacaatgtcacttcctgtccattgatatccagtttcagagaacctgtttcgttgatctcgtccattgctgcattgccatcgagctgatccagtgcagccttgattccacctaacattttaccatattttggtcccactgtctttaactgtggtttaaaactataggaagtaaagtctctcacatcgtctgtaaatttcacattttttacattcagctcatctgctacgatctcctggtagaattccggcagatcaaatcccgccttcacaaacatctgtccgatcggctggcggtttttgatgttggatgtattacgacatgcacggcccatgacaaccagctttaatacattatccatatctgcttccagtttttcatcgatcagttcttcctgaacttccggataatcacacagatgaatactctccggagcagatgcatcgatgctcttcaccaggttctgatagatttcttctgtcatgaacgggatcatcggagcagcaactttggatactgtcacaagtgcagtatacaatgtcatgtatgcattgatcttatcctgttccataccttttgcccagaaacgctcacggcttcttctgacataccagttactcatgtcatctacaaagtcctgcaatgctcttgcactttccggaattctgtaatttgccagatgctgatccactgtctttgtcagtgtattcagtttggacagaagccatttatccatgactcctaatttatcatattctaatgtatattttgttgcgtcaaatccatcgatattcgcatacagtacgaaaaatgcataggtattccacagagttcccataaatttacgctgtccttctaccactgcttttccgtggaaacggtttggaagccatggtgcactgttgctgtagaaataccagcggatcgcatctgctccgtatgtctccagtgcgtcaaacggatctactgcatttcctttggacttactcattttttgtccattctcatcctgtacatgtcccagaacgataacattcttatatggtgccttgttaaacagcagtgttgaaatcgcaagcaaagagtagaaccatcctcttgtctgatctaccgcctcggagataaaatctgccgggaactgctgtttgaataaatcttcgttctcaaatggatagtggtgctgtgcaaacggcatagagccactgtcaaaccaacagtcaattacttccggtacacggtgcatctgttttccacattccggacaagtaattgtgacatcatcgatgtatggacgatgcagttcaatatcatccgggcagttgtcagacatttcttttaattctgcaatacttccgatagagtgcatgtgtccgcattcacactcccaaatattcaacggtgtaccccagtaacggttacggctgattccccagtcctgaacattctcaagccagtctccaaaacgtccttttccaatactttccggaatccagttgatcgtgttgttatttgcgatcaggtcatcttttacagctgtcattttgatgaaccaggactcacgtgcgtagtagatcagcggagtatcgcatctccagcaatgtgggtaactgtgctcaaatttcggagcgtcaaagagaagtcctctctcatccagatctttgagtaccatcggatcggctttcttcacgaatactcctgcaaatggagtctctgcagccatatcacctttttcgtctacaagctgtacaaaaggaagttcataatttcttccgacattcgcatcgtcttcaccaaatgcaggcgcaatgtgaaccactcctgtaccatctgtcaatgttacataattatcgcatgtcacataaaatgcttttttatgctgtttctctgcactgtcagctgcacactgatacagtggttcatactctttgtactccaggtcttttcccacataggtttccagaacttcgtaagcaggtgttccttcttctgcaagttttccaagaacagtatcaagaagtgcctctgccatgtaatatacatatccgtctgctgcttttacttttacataagtctcacttggatttacacaaagcgccaggttcgatggcagtgtccaaggagttgttgtccatgccagaatatatgcatcttcatcttttactttaaatcttacaattgcagaacgttcttttacatccttgtatccctgcgccacttcctgtgcagacaaaggagttccacaacgagggcagtacggtacgatcttaaaccctttgtaaaggagttttttatcccagatctgtttcaatgcccaccactcagattcgataaaattgttgtcgtatgttacataaggatgctccatatccgcccagaatccaactgtgctcgaaaagtcttcccacattcctttgtatttccatacactctctttacatttatcaatgaacggctccagtccgtacccctcgatctggtcttttccatccagaccaagcagcttttctacctccagctctacaggcagaccatgtgtgtcccatcctgccttacgaggaactttataccctttcattgtgcggtatctcggaatcatgtccttgatgacacgtgtcagaacatgaccgatatgcggctttccatttgctgtcggaggtccgtcataaaaggtgtactccggacatccctctttctcttccatactcttctggaaaatatcatgttctttccaaaatgcctcaacttctttttcacgtcctacgaaattcatatccgtggaaactttcttgtacatagcgcttttcctttctactattttttcattatcgtgttgctgtctatgctgtacaggactctgtgctgccttgctttttataaaaaaaacttccgtcctgtaataggacgaaagtttaaaattcttacgttaaccacctgttacaacatacttggatatcctctgcaatatccgttatatgcgttcctttaacggcggaaccccgtcagcctttacttcttacgtttcaaggactgcagctcgaaagtgatcttcggaaaaatcttactgataccggactcacaccgcctccggctcgctgaaatgttcagaaaaatcctactctctttgtcatcgcttttttttattaaaatacaaaattattataagaagaaacttgggaatagtcaaggggttctgaaagaaaggatttgatttcgatgcgattacgcaaattgacttatataaagagcttgatacttttcccccttttgcatcaattcctcatgggttccaatttctttgatatcaccatcttccatataaagaatgacatctgcatctcgaatggtagataaccgatgtgcaattacaaaactggttcgccctctcatcaactcttccattgctttttgtatttttacttccgtatgcgtatctacattgctggtagcttcatccaggatcataatttccggatccgatgcaagggctcttgcaatcgtcaaaagctgacgttcaccctgggaaatattttccgctccatgctccaaaatcatatcatatcctccgggaagcgtttttataaagctatgagcacacgccgactttgcactggatatcacagtttcccgctgcatgttctcctctgcataaccaatattctccgcaattgttccctcaaacagccaggtatcctgcagaaccattccaaatcgacttctcaattcttttctggacatttctcgaatatccactccatctaccagaatttttccgttattaatttcataaaatcgcatcaacaagttgatcagtgttgtttttcctgctccggtcggcccaacaatcgcaaccttttgtcctggttttatcgtcacatcaattcctttcattaacaaagaatccggtgtatagccgaatgcgacattttggaaggaaacactccctttacagttttgtggtatcacgcaatggtttgattccggaatttcttcttcagcatccaataatgcaaaaattcgctttcctgctgcagctgctgctccaaaactgccagccattcctgcaatggaagaaaacggttctgcaaactttcttgtatattccagcattgcctgcacatttccaattgcaattcgccctgcaattgcaccgatacaccccagacccgcacaaagcacatacccgacgtcattgacaaccgtggtaattggcgtaaccgctcctgccgttgtttctgccttgaatgcactttgacgaagctgctcatttagctcttcaaaagccgcctgcgctcgtttttgataatgaaacgtttgtacaacctggtgtccatgatatatctcctcaatgtatccatttaatgttcccagcaactgttgttgacggttataataagttccacttaatttcatcattttagccgcactcagcaatgacagcggcactaaaatgatcggaatcacggacaattttggactaatagacaccatcatcaagaaaatccctgctgcagtcactgcctgcgtcacaattgccgtcaaattttggctcattgtattattaatggtatccacatcatttgtaatcacacttaaaatatctccatgcgtatgtgtgtcataatactctaatttcaatcgatgcattttatcgtcaatatcctgccgcagcgtttccataacccctgctgtaattttagccattccaaatccttgtaacagtgaaaaaatttgcgaaataaaatacagtccgatcaatatcaatagcagtgttcctatcgttttccaataaaatctgccatcctgaatacttgcaaataatgttgttgtaatttctccgattacaaacggcgccaataccataaaaatggtactgattcctgcaaaaaccaaaaccatacaaagccgcagacgatattttttcaaataaccaagcaagcgcctaaagacatgctgattgttcatccttccagttctcctctcccaattgtatactcgcgatttcccgatacaacgtacaagtttgcagcagctctttgtgtgttccctgccccacaatacgcccgtcatcaatgaccagaatccgatctgcatccataatcgtactaatgcgttgtgcaacgacaatgaccgttgcttctcccattgcctctctcaaattttgccgcagttgtctttctgttttcatatccaaagcagaaaagctgtcatcaaacacatagatttccggctgcttcatgaccgctcttgcaattgccattcgctgtctttgccctccggaaaaattagttcctccctgtgcaacatgtgcatgatattgctgcggtttcttctgaataaattctgccgcacatgcaatttcagcggcccgattccactcctctgctgtaccatgttccttcccaaaattgagatttgacccaatatcacctgaaaacaatacatttttctgtggtacatatccaattagtgctcttaaatcctgcagtcggtattccctcgcatcgattccatcaattaagacttctcctgcggttggatcatacaatctgggaatcaattttaaaatactggactttcctcgtcccgtaccaccaataattgcagttacttctcctggttttgattcaaaactaattccttttaatacttcctcctccgcatctggataagaaaatgttacatttcgaaactctaccgtggcacgtaatggacgattttcaaccaaagcttttccatcaacaatcctgcttcccgtttgcaatacctctgcgactcttccggcacatgcatatgtggtaggaaacatcatcaccaccattgcaaataacatcacagccatcaacaccatgctgatatactggctgttcgctactaaaaagccaacctccattgttccgctttctacatagcccgctcccatcccaagcacagccactgttgtcatcccaaatactacattgatcgtcggcaaaagccaacttgtgatctttcctgtagtcattgccgtattggcatagtcctgatttgccacatgaaatctctcactctctttttgctgtttgttaaatgcccgaattactcgcacaccctccaaagattccaaaaacagacgattgatctgatctaatttctttcgaagttttacagaatattttgaagcaaatataacaatcactccaagacctaacaacaatactggaattgctacaaccaggataatgcttacctttcctcccgttccagcagaaaacaccagccctgcaattgccatcataggcgctaaaagccctatacgaagcagcatcgtcaaaaaattttgtatattagtaatatctgaagtacttcgtgtcacaagactggctgttccaaattgatccaattcagcagaagaaaaactctggacttttgtaaatacctctgccctcagttttgctgcaaattctgtagaaatccgcgaagcaattttcacagatacaaaattcaaaatacaggcaaatacacaaattccacacatcagtgccataaatatcaaaatacttcggtgttcctgttttgctacccctttattgatcatctgtgccaaaagagagggaaggagcatttcccctactgaagagaagaaaataaagactgccagtattccaatttgttttttttgtaatgttactttcgaaaaaattgtcttcataaccgtctccttctaattgaccagttgaatcttagataaacgaaagaataatgctcccaatgcatatttttgtaaactaagatattcttcaggtgtcaccattcccccataatttagcacttccattgcgccactcgctccctgaataaaaattccagaagacgtaaatccattttttaaataaaattttcttctggcaattctctgctctttattctccgcctcgtcttccagacgttcaattagtaaaacaacttttttcccgctaaatctttggcagatatcctgcagcatccggcttcccgtcccccgactcctggtctttgcagatactgccagataatctaccataatcatattcttaaaaggaatcacaacaataaatccttgtactgcattgtttacggtttctacaaaaatttgtacttttccacattttacagaatgttgcaaaacccaaaatggtttccgctctttttgaggaaatgcctctatataaatgttacggatttcctgccactgatttttttctacgcttgaagctatcatgtttttactccttgtttttttcttttgcatgaagtatcataatatgtacagtaactgtacagtcaagaggtgattctatgaaaaataaaaaatatttgttttcatctggagaatttgccaaattaaatgggattaacaaacgtacgcttcattattacaatgagattggcttattctgtccggaagtcatcggagagaatggatatcattattacacctgttttcaaaccgtacagttggagctaattcttaccttacggcgaattggattgtcgattgatgatatcaaatcctacgtcaatcactcttctgaagtacccttccacgaaattctggataacaaaaaaaagctgatcgatcattcgatcaaccaactgttagcagcaaaatcatttttacagcaaaaatcagataaactgaaattaagcctaacggcagagcatggaaaaatagaagaaatccaactccctgctcaacgtattctacactcttcccctattacaggcaattatgatgatcatgattttttaattgctgctgaattttcgcttcgtctgaaaaaagcattcggactttatgataattttggcagccgtatatctgctcagtctattttagatgggaaatttcatcaatatgatgctttttttgcatatggccatgcggatgtagaagactacgatgagatacgtcccgccggaaactatcttcaaacattttgtatcggcgattgggacaaactgcaagaagtgtatcagtctatcctttcttatacagaaaaacatcattacactttatacgggtatttttatgaagaaggcttaaacgaactatccattcgcaaagaggccgattatattacgatgattacagttgcttatcaaaaataacacatatttctttttaggagtgattaaacattgacgttacaacaattaagatacatctattatacatttctcataaatccatgtaaaatatgagaaaacaacggtttgtcataggaaaaaattatggaaaagaaaaaagaaataaaaaaacaacacctaccggtgctgctctctcattccatctatatatcttgtaccttcaaaactgcatacaaagaatccatcctttttcctatcaccttgcttggttatgccctcgacctattagtaacagtcagctccatgtgttaccacacttccacctctgccctatctacctcgtcgtcttcaaggggtcttactaacttgacgttatgggatatctcatcttgaggggggcttcacgcttagatgccttcagcgtttatcccgtcccggcttggctactctgctatgcatttggtaatacaacagatccaccagcggccagtccaccccggtcctctcgtactaagggcagctcctctcaaatatcctacgcccacgccggatagggaccgaactgtctcacgacgttctgaacccagctcgcgtaccgctttaatgggcgaacagcccaacccttgggacctacttcagccccaggatgcgatgagccgacatcgaggtgccaaaccactccgtcgatgtgaactcttgggagtgataagcctgttatccccagggtagcttttatccgttgagcgatggcaatcccactttataccaccggatcactaagtcctactttcgtacctgctccacccgtcggtgtcgcagtcaagctcccttctgcctttgcactcttcgaatggtttccaaccattctgagggaacctttgagcgcctccgataccctttcggaggcgaccgccccagtcaaactccccacctgacattgtcccccagccggttcacggctgctggttagaaatccaatactacaagggtggtatcccaacagtgactccctgacaactggcgtcatcagttctcagtctcccacctatcctgtacatgcaatatcgaatcccagtatcaagctagagtaaagctccatggggtctttccgtcctggcgcaggtaaccagcatcttcactggtatttcaatttcaccgggtgcattgttgagacagtgcccaaatcattacgcctttcgtgcgggtcggaacttacccgacaaggaatttcgctaccttaggaccgttatagttacggccgccgtttactggggcttaagttcaaagcttcgccttacgactaacctctccccttaaccttccagcaccgggcaggcgtcagcccatatacctcacctttcggttttgcatagacctgtgtttttgctaaacagttgcttgggccaattctctgcggccacttttacatggcactccttctcccgaagttacggagtcattttgccgagttccttaacaatgcttctcccgtcggccttaggattctctcctcatccacctgtgtcggtttacggtacgggtatatcataaacaatagcggcttttcttggcagccagctcacatacttccggctttacgccccacgtcacgtcttcagattgtacaccggatttgcctgatgcactcctacctcgcttgtaccggtttttccattcccggcttatgctctctgtctgcgtccccacagttctgttatgatatagtacaggaatctttacctgttatccatcgactacgtctttcgacctcgccttaggccccgacttacccagagcagatcagctttactctggaaaccttagatattcggccggaaggattctcaccttcctctcgctactcattccggcattctctcttcttaacagtccactgctccttccggtacagcttcgccccgttaagaatgctcctctaccaattgacattcatcaattcctaagcttcggtagtgtgtttcagccccggacattttcggcgcaggacctctcgactagtgagctattacgcactcttttaatggatggctgcttctaagccaacatcctagttgtcttcgaaatcccacatccttttccacttaacacacattttgggaccttagctgtaggtctgggctctttcccttttgactacccaacttatctcggatagtctgactcccatgcaccatctacacggcattcggagtttgatatcccttggtaagctttgacgcccccttaggaattcagtgctctacctccgtaagacttgcatgaggctagccctaaagctatttcgaggagaaccagctatctccgggttcgattggaatttctcccctatccacacctcatccccacccttttcaacggatgtgggttcggtcctccattgccttttacggcaacttcaacctggacatggatagatcacccggtttcgggtctactccgactgactatttcgccctcttcagacttggtttcccttcggctccacaccttcagtgcttaacctcgccagccagcgtaactcgccggaccgttctacaaaaagtacgcggttccgcatataaagcggttccacagcttgtaaacatatggtttcaggttctctttcactcccctcccggggtccttttcacctttccttcacagtactatgcgctatcggtcactaaggagtatttagccttacggggtggtccccgcgcattcccacaaggtttcacgtgtctcgtggtactctggatcctgcttcgctcgctcgcctttcgtgtacggggctttcaccctctctggctggctttcccaaaaccattctactaggctcactcatcgattctgcagtccgaaccccggagtgcacgcactccggtttgggctcttccgcgttcgctcgccgctacttacggaatcacatgttgttttctcttcctccggctacttagatgtttcagttcaccgggttcccttccacagcttatggattgggctgtggatacttgaggtcttctcaagtaggtttccccattcagatatctccggatctcaggatatttgctcctccccgaagcttttcgcagcttatcacgtctttcatcggctcttagtgccaaggcatccaccatacgctcttattagcataaccaactgacaagaaacacgggttggtttctcatcgacacatgtatagcgttacatgcgttggtaatagtttgttttgttataatgttgttaacattacctcggatgtcttgttgaattttattcaactctcttattttcataagatatttctctttgtatgcaattttcaaggtacatctgactgctttttcatcagtcattagaaactaaaacctcttttaatctctaatcactggtgaaaccagttatctctaacagcacttccctgctgatcgggttggcggcgataagttgttgctcatctatgcctgtatctatacctaaagacttcgtgtggtcttttcacacgttagtcggttgctacttcagatttcatggtaaggtcctttcgaacctggatatctgaagtttcattccgaaacctgtcttttttcttttttagttttggcggccacctactctcccacaccgtctccagtgcagtaccatcggccgctcaggtcttaaccatcgtgttcgggatgggtacgggtgtttcccctgagcgcatcgccaccaaaaaagttgagttcttgatgaaccctcataattaaacaatagctcttacttcctctacttctttctccttagaaaggaggtgatccagccgcaccttccgatacggctaccttgttacgacttcaccccagttatcggtcccaccttcggcagctccctccttacggttgggtcactgacttcgggcgttactgactcccatggtgtgacgggcggtgtgtacaagacccgggaacgtattcaccgcgacattctgattcgcgattactagcgattccagcttcatgtagtcgagttgcagactacaatccgaactgagacgttatttttgggatttgctccccctcgcaggttcgcttccctttgtttacgccattgtagcacgtgtgtagccctggtcataaggggcatgatgatttgacgtcatccccaccttcctccaggttatccctggcagtctctctagagtgcccatccaaaatgctggctactaaagataggggttgcgctcgttgcgggacttaacccaacatctcacgacacgagctgacgacaaccatgcaccacctgtctcctctgtcccgaaggaaagctccgattaaagagcggtcatagggatgtcaagaccaggtaaggttcttcgcgttgcttcgaattaaaccacatgctccaccgcttgtgcgggtccccgtcaattcctttgagtttcattcttgcgaacgtactccccaggtggaatacttattgcgtttgctgcggcaccgaatggctttgccacccgacacctagtattcatcgtttacggcgtggactaccagggtatctaatcctgtttgctccccacgctttcgagcctcaacgtcagtcatcgtccagtaagccgccttcgccactggtgttcctcctaatatctacgcatttcaccgctacactaggaattccgcttacctctccgacactctagcctgacagttccaaatgcagtcccggggttgagccccgggctttcacatctggcttgccatgccgtctacgctccctttacacccagtaaatccggataacgcttgccccctacgtattaccgcggctgctggcacgtagttagccggggcttcttagtcaggtaccgtcattttcttccctgctgatagagctttacataccgaaatacttcatcgctcacgcggcgtcgctgcatcagggtttcccccattgtgcaatattccccactgctgcctcccgtaggagtttgggccgtgtctcagtcccaatgtggccggtcaccctctcaggtcggctactgatcgtcgccttggtaggccgttaccccaccaactagctaatcagacgcgggtccatctcataccaccggagtttttcacacggtaccatgcggtactgtgcgcttatgcggtattagcagccgtttccaactgttatccccctgtatgaggcaggttacccacgcgttactcacccgtccgccgctcagtcacagttgcttcaatccgaagaaatccgcaaaagcgcttcgctcgacttgcatgtgttaagcacgccgccagcgttcatcctgagccaggatcaaactctcgttaaaagtgttcgttccggtcagaattaactactagctaattcatcccttttactgtctgtcacattctcatgtgacgggtgcatctcttagatgctgttcttaaaaaatcttctcttaagaaattttcaaggttgttgtctattgtttaattatcaaggttcttcgctgttcttgtttataagaagtagctttaatattttatcacgccgtttcttatttgtcaagaacttttttatttttcttttcgctgtctgttccggatttttttctccctcacaagtcagcctatttagattatcacattgacttctctttgtcaagaacttttttcactttgtacagcgatctgctctcgcatcctgtcccacagcggcccttaggcttgttcttttcatcggtctgcctcagcgacaagtggtatcttatcatgggaaaagtgaattgtcaatgttttttctgttttttatttttttcgcataattcagacaattttatgtgtttttcttataaaaaaggatgcaacctaagccacatccttttttctcaaaataatgaagtaaatgattgtatcaagtttggaatctgtgttttcaaagctgaaaatgtcatgaacagtacaaaaatatagctgattgtcatgcatattcttaataccgttggttttttatacccttcattcacatcttttcgccaaagcagcagcaatatgaataaccctgctaccggagtcgcaatagaagttgccacgtttgccatcaaaatcagctgcgttggagatccaccatagctatagcaaacaaccatcgcaaatatcagacaaagcagacatcctatacggattggtttggactccaatccagtatctttgtcaaaccctgcacttaacaacaccatacccctttgtgtatttcctaataaagaagaaaatcctgctcccagtaaagcaattcccataatgtattttgctgcattacccataatcggaactaacatttctgctaattgtgcaggtgctgtgattttttggcctgtaggatgaaggacaattgccccaactaatataattgaccctgtgatcaaaataacactgataatatgaacgactgcatctgtcaacattacgccattgaacaggtcttcttttttccacttcttttcttttccaagataagtactgtaaattcctgtcgttactgctgcatttgtagaaataaaggccagcgctgttgcgagcccgcctgccggcattttaaaactgataaaagactttcctgtttctccccaatccggacctcctacaccgatcaaggttgcataaaatgcaacaatcattcctaaaatgcatgccgtaataatcttttctacctttgagtatacattttttgtaaaataacagtaaataacaactgcgatcataaatgcagatccgattttccagtttaatcctgtaatcagatttacaccagctcctgtgccggatatatttcccattgtaaaaaacaagcatgccataaatagcgcaattcccacaaaacctgctgctacaggtccatagtatttgcggattgcatgaattgttggcattccggtaataattgcaagtcggtttgtcaccatcataaaggtgattcccataaaaacaatcggaatcagaagccaaatcaatgtatatccaaaattgcttcccagcattgcagcagttgtgattgctccgggaccaatcacaattcctgttgcaatcaatcccggaccaattcttttgatcaggtcctttaatggaagccgttcaacattttgcccaaaaacttctgctgttttgttttccataaggtcacactttcctgaattaacgtttgtactgttccatatctacttttggaaggtcgctacgttccagtcccagagcaacccagtctttttcttcctgattcagtggaagcaccggttttctcatcaatgcatttgagaagattcctctctgatataatgcttctttcagtctggcatgtgcttctcccgatggctgtccgcctccgtaaattgcctgcgaaatatgatagatacggtttgaccaatcctgcgcttcttttaatgtatgtttgtctggatttgcaaacacttctcttgccgggcagatgatttccggtacacagccggcaaatccgatgagtgctccatccattcccgggaaccagcttacacataatgtttcatcatggcatgtaatcaatgaaatatccgggcattcctgacgaagtaaacgtacatcatgttcatatatagaagttactcgtgttcccatcttaatacatttgacatgatcgatttctttacacattttaatcaatgtttctacaggataaaaagctttgcttgttgccggatacagatgaataataatatcaatatctgctccttctgcaacgtcttttacatattcaaaaggtgcatctggattcatgccaaatctcagccacatatgagggggcatcagaagaattccatctgctcctgcttcttttgcttcttttgccatttcaatactttctgctgtattttcacagtttacaccggaaatgatcgtcattacgtctccgcactcttccgcacaaatttcaacaactcgttttctctcagctcttgtcagccctgtaatttctccagtgtgcccattacatacaaggccatccattccttttccataaaagcttttaatccatctcaaatatgctctgaactcaggttcattgatagaatagtcttcattgagtggtactgaaactgccgggaaaattgttttgaaattttttacttttgccataattaagatctcctttacttttacacattctattttgatgattcgaaggttctgcgcaaaaccttttttatgtatcagcaaacgtttgcatatctgttattctttatataacatatttcagaaataatcgtcaataaaatagacttcctctgcaattttttgcacatgccatgcaattttttgcatattttgtatgaatttcatctgattaccctgtttttttcaactatttgaccaaaacggttttttgcgatacaattacttttatcaaaacatatatacaaacgtttgtatgtttgctggaaggaggaaatcatggcaactttaaaagatgtcgccaaactggcttgtgtagacgtcagtacagtatcacgggcactgaataatacttcttatgttcacccggacacaaaagctcgtattctggcggctgtcaaagaacttagttatcagcctaacgtcctggctaaaggtcttcgccagggaaaacgccacacaattggtattgtggtacccagattatctatgactgttttcgcagaactgattcaaggaattgaagaagaagctcgctaccacggatattctatcttagtatgtacaaccgaagatgatcctgatgtagaaagagaatgtttaaatcgattgagaaatggatttgtagatggaatcatcattgccggaaccggtaaatgtagccgattgcttcgtgacattcataccagtggtatttctgttatacagatcatccgaaaacaggaatccaatatcagcagcgtcatttccaactataaacaatctgcataccatgccgtaaaatatcttgcagaaaaaggatgtagggaaattggtttaatcaatggtcccatgtccctctcaacctattatgaacgttatcagggatataaaaaagcaatttctgaactcaacttcacagaaatctgtcctgaatcaaccgaacaagccaatacctttgaatatggatttcaatgtgcggaatctctgctaaccaattattttcacctggatgccattattacttctgttgatattcagggcatcggagctctgcgggcaatcaaggaacaatctatgattgttccagaagatattcgcctcgtcagtctgacaggacactccattggaagtatgctggaaactacaatgacttcccttgaaatccctgcacatgaaatgggcaaaaaggctgttctgatgtccatcgaagaaattgacgctccatccgatcaaaaaccaagtcctcagcaccttgtttttgaagctactcttgtagagcgggaaagctcttaaataaaaatggagactgcccatttgggggactgtctccatttttctatgccgcactgccatttcggtatccattcggccgaccgcatgccttttcgaattctttcaatttttcttttgcctcaggattcaaatacttcggcacttctatctgtactgtcacatactgatctccatgtacagaggcatttttcatcgatacaattccttttcctctcaatcggatctttgttccagattgtgttcccggctgaattttacacataacatttccataaagcgtagtcaccaggacttccccgccaaagacagccgttgtgaacggaatatgaatcatcgtatacagatccataccttttctttcataccccggtttatcacctgcctttacttttaacaataaatctcccgcttctccaccatgatttcccggcattccctttccgcggagtctgatactttttcccgtctcaatccccgccggtatatgaacctgcagagactgtactctgcctcttccatctgggctctgaaggtgaatcactttgtcacatccaaaagcagcctcttcaaaagtaacagaaacttctgcctttatatccccaccttttcttgcaaactgactgccgtcaaatccctgactataaaatcctccgcttttaaaaccattggattgttttccctggaaaatatggtcaaacatatccccaaagatgtcatccatgtttccgctttcaaaatgatattcctgatatcctcccccggaatttccgaaaggatttccatatgggttctgacctgccccgcttccatcaaatgctgcatgaccaaactgatcataaagtttctttttctccggatcacttaaaatcgtgtatgcctctgtcacttctttaaataatttttccgcatgctgatctccgggattggtatccggatgatatttttttgccagtttccgatatgctttcttgattgtccccgcatccgcatccctgctgattccgagcacttcataataatctctttttgctgccatcctttcttcacctcctgttcaaaaaaaatccccgggatcacaatcccggggaaagtaccttttatccttctattgttacatatcgtttttgatccacaggtttcttttcctcttttttcgggatatcaagcatcagaataccatcttcaaattttgcatgaatatcggtctctgtgatatcctccccaacgtagaagctgcggctcatatttcccacatagcgctctcttctgatataggttccatttttattctgctcatctttatcgagaccttttgctgcacggatcgtcagatatccatctttcagctctgctttcacctcttcttttttaaatcccggcagatcaattgctacttcataaccgtgttctgtctctttaacatctgtcttcatcaatcgttctgcacgttttccatataattttctgtcaatgtccgggaatgaaaaatccatccaatcgttaaataaatcttctccaaaaatactaggcatcatcataagtcatatctccttcctatactatacaatcatctatgtaaagcacaaccggtcaatccggagtgttgattactttttgatgaatccttgttacctttgttctatttgtaatatagcacctaatatcagccatgtcaacccttgagtgctaatttttttctttcttgacaacccacgtcccctctgttatgataatagaactgcaataagggagtagttagctctatacagagtcgctgtatcaacacattgatgatttccatctggtacagcgttcaataacgagacttattcacgtgatatttttgcgtggataggtctcttttttatgaaggaggaaacaaaatgagcttattttctgtatttctgatcgggattggtctgtccatggacgcctgtgcagtatctttcgcaaaagggatctgtctcaaaaaacaagtcaaaatttatgccctgaaacttggacttgccttcgggatttttcaggcactgatgcctctgatcggttggtgggtgggaacctattttgaatcccttatcacagctgtcgatcactggattgcattcttcctgcttggttttatcggaatcaatatgattcgggaatccaaagaagcagaagcagaatgtgatacttatgtggattctattccggcaaaggacattctgctgctcgcagttgcaaccagcattgacgctcttgctgttggaatcagctttgcatttttaaaagtagatatcatttctgccgtctgtctgattggcatcaccacatttatcatcagctttgctgctgtttttcttggaaataaggtgggaggaaaactcggcaaatatgccgagatcaccggtggtgtcatcctgatcctcattggtctgaagattctgattgagcatttatttggattataaaaaagaaccgaaaaggagacttctataaaaaactccttttcggttctttttcaattcttacagcaatccgacaatctgataaaccacgaatgccatgatccatgcaatcagacattggccaaataccattgctgctgcccattttcctcccagctcacgttttacagatgcaattgctgcaacacatggcgtatacaacagacagaacaccaacaacgctgctgctcccgggatggtaaggctgctctgaagtgccgcactgcttccgaataaaacagtcaaagaagatacaacactttcttttgccataaatccggaaatcaatgcagttacaattctccagtccccaaatcccacaggaaggaagattggggcaagtaccccggctgccaatgctaaaatactgttctgagaatcggaaaccatattcaatcctgtatcaaagttctgcaggaaccagatcacaatcgttgcgataaaaattacagtaaacgctctctgtaaaaagtcttttgctttgtcccacaagaggtgtcctacatttttagctcctggcaaacgatagttcggaagctccattacaaacgggaccgcctctcctttaaacgctgtctttttaaataccagtgccattacaattcccattatgattccaaaaacatacaggctgatcatcacgagcgctccatgattcgggaaaaatgccgctgtaaaaaaagcataaatcggcagctttgccgtacagctcataaatggtgtcagaagaatcgtcatttttctatccctctctgacggcagcgttctgctggccatcactccaggaacagtacatccaaatcctaccagcatcggcacaatacttcgtccggaaagccccagttttcgaagcagcttgtccataataaacgcaactcttgccatatatccgctgtcttccaaaagtgacaaaaagaaaaacagtgtcacgatgatgggcaggaaactcaacacgcctccgactccgctgaaaattccatcgatcacaagagaatgtactaccgtattgacatgcgctgctttcattgcatgatccaccacatctgtcaatgctgtgattcctgattccagaattccctgtaaaaatgctccgatcacattaaaggtcaaccagaatacaattcccataatcccgataaaagccggaattcccgtgtattttccggtaaggatccggtcaatctttctgcttctgatatgttctttactttctttaggtttgatcacagactcattgcagacatcttcaatgtaggcaaaccgcatctgtgcaattgctgctgcacggtccatacccgtctcttcttctgtctgtcgggaaatatcctccaacaaatgtttctcattttctgtcagattgagctgttctaatatctttgtatcaccttccataaccttgcttgccgcaaaccggatcggtatctctgctttttccgcatgatcttcgatcaaatgcatcaccgcatggattcccctgtggattccttcttccttccggcaaaaatctgtctccaacggcttttcctgatattttgccacatggatcgcatgttggatcaattcctcgattccctctgcttttgccgcagaaatcggaattaccggaacgcccagagctgcctccatttcattgaccagcacggaacctccattttcccgcagctcatccatcatattcaatgccacaaccatcggaacacccaattccaataactgcattgtaagatacagatttcgctcaatgttcgttgcatcgacaatattgataattccttttggtttctcacgaatgacaaactctcttgtcacaatctcttcactgctgtacggagacatcgaataaattcccggaaggtccgtgatcagcgtattgtcatgtcctttaatcgcaccatcttttctgtccactgtcacacccggaaaattgccgacatgttgtttagaacctgtcagctgattgaacaatgtcgtctttccacaattctgattccccacaagtgcaaatgtcaatatttctccttcaggcaatggagtttcgtcttttcgattatgaaactttccgccttctccatatcccggatgcagtttttcctgcttttccacatgttttttgatttcttttggcctgtgctctttgctgatctctatattttttgcatcctccagacggattgtcagttcatacccatggatccgcagttcaattggatcccccattggagcgtactgaacaacagttacttcggttccctgtatcagtcccatatccagaaagtgctgacgcagagcaccttcccctccaaccgagagaatggtagcagtgctccctattgataattcatttaatttcatagttcattatccctctttttcattagctctgtctaacacatactcttttacattacactgatatttccgtaaaatcaactgttttgcagtggctttttcctatttttgcttataatgttctgtcctatcctctgtatttttcaaatcgatactgctgtttgacatccggatacttctctttatcaacttcactcataaacatcccatacggccttgcacaaaccttaaatggtgaatacaaaccctggtaaatcaccaatttttctcccgtttctgtatgctgtgcaaatgcaagaactttatataaatactccgatgtctcctcagacacccactcccgcttaaaatgctgcacaatatccccaacctgaatatcacgccggatcgcttcttctgtttcggcttccggctctgtatccaattctatatattcttcttgatccaaagaaatcggaactcctgatttccccatgatatgaactcctccataccatgtgcccatcacttcaaacaagtctcccacctgatattccgaggtatattcatcattcttttttataattctaattctgctcattttcttcctcctgttgtcccatatgcctaaattccttcacaataaagaaaatacacagcacagctgcaataccatctgcgatcggtgcagagaacataactccttcaatcccgataaacacaggcagaatgatcagcaatggcagtaagaaaataatctgtctcgtaagagataaaaaaacaccctttcccgcttttccaatggatgtaaaagtattcgctgtgattggctgaattccattgataaatgtaaaaaacatatagatccggaaaaatttctccgcgaaaagaaaatattcttcacttcctgatccaaaaatcccgataatctgtctcggaatcagttggaacagtaaaaatgcaacaatggaaatccctatcgccgctgtcactgcttttttataagtacgctttacccgatcataatttccggcaccatagttataactgataatcggctgaattccctgagaaatcccaatcacaatagcaaagaaaatcataccaaccttggaaataatccccgcacaggccaaaggaatgtcgcttccataagaagatcgtgccccataataagtcagagtattattcataacgatctggacgatcatcattgcgatctgattgaaaaatggagcaattccaagagaaatgattggaatccatgccgcaccggatgggataagtgatttcaacggaatcgaaactgttttaaatctggacagataccacaaaaccatcaccccggatactatttgtccgataatggtagcccaggctgcacctgccatacccatatcaaaaacaaaaataaataatggatctaaaacggtattaatgactgcacccactaaagtacacagcatagagaatttgggactgccatctgcccggatcagattgctcccacctgttgttacaattaaaaaaggaaagccaaatgctgtaattcctgtatataccaatgcataatccagaattttatccgtagcaccaaatgccctcatcataggttccaggaaaatctgtgacactacacaaagtaaaacacccaggatcaacatcattccaatggatcccccggcaaatttcactgctttttctgtttcccttcgccccatgcaaagattgaaattcgcagcgcctccaactccgcacaaaagcgaaattgccgtacacgtaatcgtcagtggaaatgccacgttggtagctgcatttcccagcattccaacacttctgccaataaaaaactgatctactatattatacaaggagcttaccagcatagcaataatactgggaattgcaaatctggcaagcaatgtcccgatgggttctgtaccaaggggattattctgtctctcttccatgaatttcctcctgttgttcttttgtattatggagcacttctttggaatgatatgccatcttttccagactgtcagctatgctctgcttctcttctttggacagtaccgacaatatctgtgaccaccatatcataagagcttctcgcatctttggaataatctcctctcctttttctgtaagatagattgcataagatcttccattatcctcggacttctttcgttcaataaatccctgctcctgaagtttcttcattgtccgtacagccagagcttcatccaccgccatattttcgcacatttctttttggctgctgccaggatttgaagataaataaaataaaaaattgtagccggaataaccaataccatattctttcatcgtctgaatcatatacttttgctctctccgatgaagaattgcaatgctttttcccaatatatgattttccatagtacttcctttcttgacaagtcaattatcattatatgtgttttaaattgacttgtcaattttttagagtccattctcatacatatcatttacgtgcatatttcatttgctttttcatgaaagaaatagaagaaaacaaaaaactgcttgagaaaatactgtaaaaatggtatattaatagatatgttcctttggtaaaatagatattaccaattcctcccaaaaaggggaatgcttcgatatcaccaacatgaaaaacaattgtaattaacagcttcaaaagagctgataattaaataaaggctgccattaccaaagactggaaaaccgcgtgttttcaagaaaaaattgcatgtgtctcgttagttaaatggatataacagggtcctcctaagactcaattataggttcgattcctatacgagacggtcagtcaaaagcgttcgattgttagcagaaatgcaaattatggggcgcttttttgatattcaaagtgctaaaaatgattattttgagaatgacttccagctaacacaattgaaaaaataattagctgtagctaagacaaaatgagatgctcgtttggaactgatttaaaaaaattggatccaggcgagcgtttttgcgtggaggaaagaaggaggaaagaaagcattgagaagtacgaaattctcaacccattgattgtcaggccggtaccggatgcgattggaagaaatataaataaataccatcgttttcttcatgatgagattaagaaatttgagagaaaaaccgaagaaaagactgcttagaaaaagagtgcttttaaaaatgcagttgagggggtgcgccctaaaacacatacataaaataaaaaataggaatctcctgtaaaaaatcaggtataaaaacgctgatttctgcaggagattcttattttaagatttagaagctaaaaacggtattaaccgatagtcccttctttttgtgtagtaagcaacacagtttaatgagttaataaactttgcatctgatttcagtgcgtccggattgatagaagttagtcgcctacattgttggatggattaacatgaatcataatatgtttgacgtccgaaaactgctgttctacctttttgtgtacgctctcggccacatcatgagcttcctgaaaagatttattcctatccacagatatttccaagtcgatataaactttattaccaaacattctggtacggagcatatctacaccaagcacatcctcttgtgccaaaatgctttctgttaactttttctcataatcctcatcgcaagaagtgtccagcatcttgataacggcatctttgatgatgtcataggctaccttgacgataaagatgcagattacagcactggccacagaatccattaccgggaatcccaacatggcgccgccgatgccgattagggaaccaatagaggaaaaagcatcggaacgatggtgccaggcatccgccaagaatgcggaagagttgatgagcttggcgtagtagcgcgtataccagtacatagcctctttgcttacaatcgaaattatggcagcgacaagcgcaatggtactgggaacggccagcgtttcatagttcccggaaaagatgttttctatgcctactttaccaacgccaattccagtggccaacagaacaatgcccagcaccaaggatgccacgcactcgaaccgttcgtgcccatatgggtgggactgatccgcagctcgtttggaaaccttaacccctatccacgcaatcaatgtagcgagcacatcggaaaaagaatggatcgcgtcagaaatcatcgcaccggaattgcccacaataccggcaaacatcttgaatccggaaagaatggtgtttccaatcacactgaccaatgacaaatttctgataattgtcttttcgttgattggctgagaagtggacgggtttgttgcttcgcgtttcgttgtcataaaagaatcctcctgtttcgtcatatatgatgacagtgatatttctcttatgagcaccccattgagataatctattccccaaataaatattaaaaaacatctgcggaacatacaactgtcccacagatgttaaaaacaatctgttgccacatcagcggcccggccccacaaacctattggttcatcgcctgctcagtttgtactgttgatctcgcaccctgaatcaggatgtaatgcagtgcaaagagtttatcaaattatacaatatcttatgtgccacatcaagaaaaggttctttcttgttaggtacatataggtacataaatagtggtttggatcgatcgtaacgctcccgctttgtgttttcctgattgtgcaggaatacattaacaagttgctctccttttattcaccaactttggagcatttggcggaaacataatatagcggaacagcaactaattgggcagctacagatacaaacaccattgccgggatgctgaaatcatagaggactcccatcagccaactaccgaggaaccagaataccccaaaggagaactcaaaaataccataacccgtagcacggctgcttttgggaaccatcgtcgtgacagccgctttcaaaatggattcctgtgcgcccattccgattccccagagaactatgccgaacagcagcatgggaacggagtggacggaaaaaacaaaaattgcaaaagcacttgaaagcagggttgaaatcatcagcgcctttaccccgatccggtcatataaataaccgaaaaacagtgcggcaatcgcatctaccagcatcgctcccgcataaagcagcggcaggtttcctgtggtaatcaacgaggatgtttccgccagaccggatgccaggccggtatagacttttgaaacgtgcataatgatcagagaataatcgataaagccaaaagcaaaaatactgattccggcaatataaaatgcaaaactctttttcatccgaaaagggatgtactctttggattccggctcaaactgttccgggttcgggaatttctttttcgtgaagaacaagagaaagatcgtaataaatccgggaattgataaaattccaaagcaaaaggcatacgtttcaaaggtgcttccgtctgtccggaacagcattacaagatacagcaataccgggcctaaaaaggcaccgatctgatccagcaattcctgaatcccaaaacttttgccgacaccttcctgggatgcggcaaatgacataatggtgtccttggcaggtttcttgatcgctttccccatgcgctgaatcaccagcagcagacaggcccagatccatccatgctctcccacgagggccaaggccggaaccacaaggacatccagaatatagccaattatagtaatcggccagtattttttcgttttgtctgtcagcctgccaaacagatagcgcatggaatagccaatcagttctcccaaaccggagataaatccgatcactccggctgatgcgcccatgatagaaagatatgcgccccgtatgcttgatgccccttcatgggtcatgtcagaaaacaaactgacaatcccgaacaggagcaggaagatcattgcctgggatatgtgttttttgttcgttttcataccttaatttccctcttcctgtactctggccgtcatagcggtaaaaccagctttgctttcctctttacaccggcagtagatacggtcaagtaatcgggcaaattcttttttttcatcttcgtccagcacgtccagcagccattcataaaagagagtttctatatgcgcttttgagtacttcaaactttcagcttttttagtaggaaatataacctggctgcgtccgtccgctggattttccgctctgcgtatgtatccctttgcctcaagattcgtcgtctgcttcgcaaccgcccctttatcggtccctaaaattttgcatatctctgcctgcgtaataccgggatttttgcgtacggtatgaaccacgtcgaattctgccactcctacaccatccgctttcatggtacgagcggtaaatttcgctacctctcgtgcaatctttgtaatttctcgttttgtaatatccatgtagatcactcccttcaaaaaagatgtaccatcaaccaattagatgatagtacatctttttaagaatgtcaagaatcattcaattgttataaatacagccgtcgttcggcgtgatgccggaaatgctatcgtccaggaaatggaacaggttggtgcagctctcatttttcgtcgctttggtcaacagctttttctaatcagttattcgtctggttccaatgctgcaaaccggtattccggcggaagtaattttaatgtgcccggcacagcctccgggtacttcgcccatgctctgggataaaatttcattttaaaatctacaactttcttcaggaggtcaagcctggaaaaagcagtttctttgaccggcgttgcagccatgcggtagagatcataataatgtctggaataccgctgcggcatttccaaatgttccggtctgttcgcttcatggtgcaggattgtggcttttgaaaggctggtaccgcccttaaaggtgatggactctttccatggtgagcggtgaaataaataatccagcgtaaaacatacccaaaagtctttttctacgatggcatcattcagccccattttatctgctgtatttctgaacagctccctgcggtcgttatccgaaagtcttgctatatttctcattgtaccttttcacctccgcaaatttgccgtatcgtatcataaacccaatccgtagactctgttgcttccttcaaacaagcctgtttatccttatctgtcagtttttcggaaagcatctgtatgacttctggcgtaacattcgatttgccaagcgtttttaatgcctgtataaccaaacttgtcatataggacaatccggtaatctctttattggtccggtgcttaaattccagctttgtagagttccactcgtaggtcttatatggaccatcgctgatataggaccatactgctgttacctgtgttgaaagacctaagaggttcaatgctgtattcccacatggggcaatcgtccagtgataacttcgtgccaatgcgttcgccaccgcttccggatctgccgccacatattcatccagaagtttgctatattttggtttttcataaacaccattaagaatccggcgcaatattccatcttgaataagccgatataaagcggagcgcactgtatttgtgtccgcaatatccgcaaaatcagaagttgaaaaaacacttccttcctctgcagataaaatcctttcacgaatttcctgcatatatccttttgccactgatttgcacctcctttgcaacgaatattatatactatccgttgcattttaagctctcagcaggtagatccagtcgtgcatcaggcacacgctgggttcgtcctctctgggaaccagatggtaggtacatcccccatagaccgtgcgtttgtcctcaatctccatgccataggctttataaaagcggtattccagattggagataatacagcgcagggtttgcagagcctccctctgagctgatacaatcagcactttaataaaaaatctgaagctgtccaatgcctgttatgcattagagcaaacaaatttaagcattgataacatttgtgagcttattggttataattccaaagaacattttatgcgtattttcaatcgagaatttaaaattacccccagtgaataccggaggcaaaagaaattttctcaaaattcaaattatcacgaccctttaacataacagcaaacataggtataaccatctccattttgcttaaaatgacatagaaaaaacgaggacttgtgatatataccctccttactggtttgtccagtaaagaggatacatgtcatatcaagtcctcgtttttcattttcaacctgttttattaacaagcgcttttgtctgactatctgctttttcttctgaagaacattgcaaatactgcaataatagctgcaaatgctacaactatcactacaaccagtccgacaatcgtagcattatctcccgtctgaaccgcaccaagtatcttcggctcttcaggtttagtcggtttgctcggttcaactggttttgtgtacacgttggtaaatacaggtgcctttccatccgcatatacaacctctgcaattaagcttccttcaccattgtcagtaactttgaccgttacctcatatgtcgttttgtcataggtgacatttttctgtttatcattcttctcagaaattacatacttataagtaccaatcttatcataggttatcgtctcaaatacaacctgtccatctcgcctgtttttcgcctcagatacaatttctccgttctgatccttcagctcaaatgtaaactgcttatcttccagttctgcaccattataaaccttagatgctccaagtattacagatgtctgtgttgtttcataaatatttttgaatacgatttctgctttgctctttgtctctgtctttgcactcaatgtaccattgccgttatcagtaaccacaactgtcactgtatgctctgctgaatcgtactgaacaccgccattatttcctttctgctcacggatcacataattatattcgcccggttctgtataaatctgaggtgtctcaaatgttacgcttccatctgctttgtttgttgcgatttcaacaatttctccgtcttcatttactaattcaaatgtgaactcgccatccttcaactcgcgtcctgtcaattccttcttaatgctcaaatctgtactgatattatagtctaccggatccacaccatagctattagtgaatgtaaagtcaaagtctgttgtgttctttacaaccttaattgttccgtcaccattatctgctactgttacagtaaatgtcttactttcaggatcattcaccacaccctgaacatctccgttctcttgtacagtatatacaaatgtctttatacgctctgtactcttaacgagagtcatatcatctgtgacgcttgattcattaccaaatacattttccattgtataaagaatctttccaaaacttacatttcctgcctggtcatttactgcttcactaagctcaggcatcggagctggatttccagttccttcttctacaccactaattgtaaatgtatacttacctgtaatatctggtgcattatttccggatactacttccaacttcttatttccattcactgtgatctctgcctcagcacttgtaccataagcattttcaaacggaagtacttccaacccattcggatatacgacttcaagacttaattttccatttccgtcatctgttacaactaccttgactgcaaaggattttctgatacttgttacaccatcagcaaagttactttcatcttctacaatgtcataatcataaatgtatacatatgccggtgcattcgtaattttatcgacagatacaattcctgccttcgcatctgcaatcagtttatctgtcgtatattcaatcggagtaaatgtaatattaccatcactgctgtttgtacctgttgatacgatattcttctgtttatccagaacattaaatgtaaattcttcttcttccataggacggtttgtcaaagatttccttgcattgatttttacatttccttctccacccaatactgtcggattgccttcataagtattttcaaatgctactattgccttctcaccttgctgtcctgttgttacgctcttctcatctacaacatcactaccttttgttacggtcgtttttgcggttaatgtgccatttttgttatcaattacatgaattgttaccgtgcgaactgcttcatcataggtatacgccgtattttctcctggtttctcaaatacttcataggtatatgtcttatctagatctgcctgagtaaatgtaactgtcttacctgccaatacatcaatgatatctaccatttctgcatcagctgctttatttgtaaattcatataccttgttgacgtcttcaaatccaaacttctctgcagactcagtatcttttgccttaattccgaatgtaaactgtcccgcttccatatctcttccgtgcaaaaccttcgtaatctgaagtcctccaaccgtattgtaatccagatttgatctgtaaatgttggtaaatgtgccattttcagctgtaacagctgctgttgcactcaaatcaccctgcaaattatctgttactgtgatgatcaatgtcgccaggtgatggtcgattgtaactcccggtattgctgacgcatcgattggattctcttttatttcatatgtaaatgtcttagacactgttccgtctgtattcgatgatgccccctccatatgagcatctgtaaacataatttttccaaatccaaatggcacaagtacgtcttcctttgcactgtcggatgttacaattaccgtctttgtaccatcttccgccgcaccttctggtgacggtgcgccatccttcggcgtcatggtaaatgtaaatacatctgtattcaaccaattacgtccggtcagtctcttattgaaatatactgcagtctctgtcggatcagtatttacttctgtaccgcctgttgcgtaattgttctcaaatgcaatccccccttccggtgtctgtacttctgctgtcaatgttccatcattgttatctgctatcacaattgtgaaatcaaaagctgtcttaccttcggcaggtgttacacctttcggcaggctgtccatcttctctcttgcagtatagttgacagtccatacaatgtctcctgtctccttctcggattttgtcgcatatcccgctgcaactgcttcattgagagactctgttgtataattcagagcctttgcaccattggcgtcacttccggcgaatgcaacctttgctgcttcaccgtctgcccctgctgcatttttccctgttgcaacaactgtctctataaaatcttctattccttctgctgctcttgtcacaacctcaaatgaaaactcctcagagtccatatcacgtccggtcagtttctttgttgccggaatccgggcagcaatgtcttcactttcgtcagtttctgcaccataagtatttacaaataccaggttatcgcttccatcctctaccgttgctttcaatgtaccatcttggttatccgctacacctacaacaatttctcttatcggtttcttgtcgtctgtcactccggcgataccacttacctgctcagttacattaaacttaaatgttccttctatactaaatttaatatttccgaaagcagcctgtttctcttccatcgtactgtcgatggtaagttccgtcgtttccggcaatgtgataaatcctgcatctgctgcatcctgagttgctttgtcagctgctgacagtgtaaatgtaaacttatcactttctaaccactggtcgttttcacgtccggtaaattttttcacaactttaagcgctgtatttccattcagacttccttccacactatatgtgttggtgaaatctgcttttgcggtctgctctgctgtgactgaaccactcttttctgccgcatcaggagtatatcctgctgccggtgtctcagtcactgtataccgtgttcctgccggaagtccggtaatcgttgctgtctcaccatctttcagtaagattgtttcggcatcttttacttttccttcacttaccttgtcttcacctttcttgatggtataagcatattcaacattcagtgccaggtttgcttgatctttcaagtttactgtaaatgtaaattctttctcagagtctatctctgtaccctgaccctctgtcaaaatgattttcttactgattgcaaggcttccgtccttcggtaccggctgactgtcgatatctgtactatacttcggactattttctccaatctgaatcgccgccttgttctcaactgttgtctctgcactctcatttactctcgccttaaaggttactgtgcctttctgtcctgccggaacatttgtcaatatccatgtcaatgttccatctttataagctgcgttatcacttgcagttccttctacataatccagaccttccggaatcacgtctgtaatcgtcactgtcgctgcttctgcttccggattcttataactgattgtgtaaatcagtacagaaccaacctgaagttctcctccgccttctacagctgagtccttgcctgggacatttgtttgaactttattcgttacatcaggctcattatcaccaatctgaacaactccctggttctcaatatctgttcctccagcttcgtttgttactactaccttaaagcttacacttcctgtttctgcagcttcagcttcaattgtccatgtcaatgtccggttggcttcatcatatacagcatttttacccgcactgtctgctacatactctgttcccttcggaatcatatcagtaatcgtaactgttgctgctgtcagagcgccttctttatcaactccatcgtttatccagttgattacgtatgtcagctcttcgcctacacctacggtgccattgttaacattctcttttccggcttttacttccttcgtgttatttccaactacgtttgtaaacttcgcttcatttccatcggagtaagtaactgatgtcacgctcagtgttccggttgcaaaattctcttcaacctttactgttacctttgccacatgagtatcgtatgtcataccgtcttctagcgtttccggtatgatctctgtaatctgatattcgtaatttccggcttcttcataagtaattgcaccaaatgtctttgttttttcatccactttagcagtaactacatctccaccttctgcaggcatcggagcaccatcttttgctgtaagtttaaattcaaatgcatccgcatctgtccagacacgtccgacaagagtcttcgtaactttgaactgcttatctgtatccaatgtaacagaggaacctttatattcatttgtaaataccagtttatcgctgccctttcttactatggccgccaatgttccgttaccattatcggttacatctaccgtgatattccttacagctgcagtgtaggtaattccgtttaatacaaatccgcctgctgccttcgtctcatcatcagcatctttgtatgcgataccgtctttatttactgcaaatcccggtatgttctcacttactgcaaatgtatactcacctgcttttttgaatatgatgtttccaaaggaagccttatgatccccagccgtcttgttgatctgaatatttactgcattctccggaagtttaacatttccgttttcaactgcctgtacagtatcccctgttgcttccagcctgaaattgaaactgtcattatcattccattcacgcccctccagaaccttcgttacttctaacgctgtcgttccgtcaaggtcacctgttgcagcatagctattattaaatgcgagaattgtctctttatatccttctgcggtttcattactttcagttgtagtttcatttccattctgatctgttaccttcgtatgaagagtcagtgttccgtcaagatcatctgtcacccaaagctctactgtgtaaatagtatcatcatatatataaccattctttgtaccaccgctgccaaattgattgtctgctccctgctcagagaactgatacttaaatgtcttaccaatatcattatttgtaaaggcaatcgcgcgctcattctgagtcttcatttccgcgattccgtcattgtcctcatctgcaacgttcttgtattctccgaacaatccatctttaagaccgatacgttttgcattttcttctgctgtcgtattatctccggccaaagcttctactttaaatgtaaactgaccttctgtcagtacatgtcctgttaaagttttccgggttacgattccacctgcggcattgtgattcaaagaagcctcatagtcattgtaaaatgttctattgttaatagtaccatttacgctcaccgtatcttccagtgctcctgttcccggatctgtaactcttacagtaattgtgacaacattctcagaatatgtcattccgccggccagagattctggtcgattctcggttacagtatacacgtaggttcctgtctgctcatatgtgatagaaccaaatccgaaaaatatctgtgttccatccgccgttccatccgctgcagttactactgcctgtaaattccccttttcatcagaggtaattcctgcctccgggttctcaattggcatcggagcatcaccctgtggtttcatggtaaatacaaagctgtcactagctgtccaatctcttccccgaagcaccttgcgaagtctccatcctgcttctgtatcgcttgtatcaacgataacagggactgctttataaacatttacaaacggtactgacacaacgcttgttgcttctgtatatgttccaagctcttcattgactgccgttccatctgttgtttttatacgagtaacagtggttgttgtacgcattgtcccatcaccgttatctgctactgtaattgcaagtgtaaattctgattgatcatatgtgacgcctccggctctatctccttctttcggcatcacctcgtcaatcagataagtgaacgtctttcctgcgtcttcttctgtaaactgaacattttggagtttaggcatattacttgctgctcctgctttctgttcatagtttttaaatgcctcatcagattttgtcaatttcttatttgctgcatccgcattatcacctgttccggcaattgtaaagttaaactcaccggcagtcattcctctaccgtttaaagtttttgttacaagtgctccgccgtcttctccatatgtgtgagatgcctggtatgtatttacaaatgccacgccgtcagcatcgtatgttgtctttgcttcaagcacaccgttatgatctgtaactgttactgttaccacttctgtgtgtgtgtcatatgttatacctccggctgcaggttctggaacaacttctttcatgttaaaagcataatttcccggttttgtgaatttcacactgccaaagtaaaatggtactgtttcaccattatctgctgccggtacattcgcagtcatagatgtttttgcgttattttcttcgaatacaatactgtcatctgcaagtcccgcttctgacgcattgtttcctgctgtcagttcaaatgagaattcatccacgttcattgtacgaccatttaatgtcttaaagcctttaatagctgtctccgcattctgaccgccaataataaccggtgtcggtgtatattcattgctaaaggtgaagttactcatacctggaataacttgcatttcactatccagatattccgttttagatgttatagctgccttaccatccgttcctgcagcctcatcgatagccactcttacataataaactgttgaatcataagtcattccattccgtttattatccgctgcaccttctggaatcacctctgtaattttatataaataagtcttgccaatatgcattccatcaaatgttacgtcttcaaaataaatgtgtccattggcaccattatacgaaataccaactcctttttccatctcacctggaatcgggcctgcctctgggtaatcttcatttttaactggttcaatctggaatttaaacattttcagttgaagtggatttttcccagaatgatctacgtaaactttatctccctgaggcccccattgcagagattgagcaacgaacatatttgtaaatactgctgtcttactgtcaattactgttccatttccttctgtatcaccaacatatttaccatcatcgtccagcatttttctcatctcactggtggcagttaattttccttcttgattatccgacacatttactgttacacgataggaagcatctgaataatcaattccaagaataccttctgcagggtcaggctccgtaattgtgtatatataagttcctggtctgtcaaaagtaatatcgccaaatgaaaacgaattactatttgttacagattttgtcagcgtattcttctctttatcgattactccatcggtgctttcttttggaagtggagcaccatttatacctgtcagctcaaagtcaaatttatcgtcatcctgccaatcacgtccttccaattcctttttcgcttgaattgcattttctcctgatagtgtaactggctctgccgcatatgtattttcaaaggctgcagctacaattttgttgccgacaatcgttccttcgattgggtttgtttttgctgtaaagccctttggaatctcggtttcttctattttatatttgtccccatttgacaatccgtatattttaacaaactccccgtcttttaaagtaactgtcgcgtgattctttactttgaaagcatctccactttcaactccgattgtatcaaatttctgtgcatcaaattctccggtaagactctcgccttctgcattggtcaaagacaacttaaagctaaaatctttctctggtgcatccacttcggagactaccgtcttcttgatttccaatgtacctggaagctctacttcaagacgtccattattacctaacgatacttcaatatttctctgagccagctcatcatcccaattcggtgtaataacctctgtcgccgttcccggaatcggattttctttgcttgctgtcaaatcatggattcttgtcagtcgaggagctcctgctttgatatacaattgaccattttcagcagtaccaatccaatctgctacttcatctcgtggatgagacaggaaagaaacagctttcgttatctcttttggctccccgttgttattcatctcataataagtcttctcataaaaatacttttctttatcagcattataactggtaaccggttctgacattgcttcatctgcccaaagaaatgtattttctgtaaagtagtagaaagtatttccggttgccggttcaaatgttgcgactgtatcaccaagcgttgtcccttcgttcggtccaggtttactgtttgtaaacttattagagtaaaaataaacacttccatctccactgttattagcagcgatatagttcttcatctcctgatctggatctgtaagagactcttttgcttcttctctcaggcttgcgttgtagaacagacgaagcggatatttttcttctacggtcatcgtattttctgttatatccacattaaaattacgaagaggaagcaatgccgctggaatttttgcctctatcgtatcacccatgcttcctgttcctctggttaccgtaataacgatattggaaacatccttatcttccccagctattccactgtaagtataattcacaacaccttcaccctctgattgggttgccgcaaaagtctggtcttccagaacaagagtattaaaggaatcaacctgcatataatcgccaagctcgtcgtggaaaattacataaccatctctgtttgcgaatccttcttccgtctgtgtcggataacctgttccggtgttgatttcttctgaaatttccttaaagatggtatttaattcattgctattggttgccgctttatagtaattagagttttcggctctgtctccaagctgccattgactgccccgactgccactaatccttttccatccgtcagcattcggatagttgctggaaacactgtgcaaataagcattaatattggtttctgtacttgtattgatgctttcatccggatcagcatcattaacaacagcaatcgtatatacaaacgcaccagtatcttttattgtcttagcgcttgcaatagtatcatttgctacatccacatcaaacccattagagtgattcggctcgccatccgtgaacatgataacgattttctgagcattctgtctcactccgtgtcctgctgaactgttcagtacccgatttgcaagattcataccaaaatctgctgaagttgctcctccggcctccagtccgttcactgagcttttcagaccatccatgtttccagtgagattgctgacaatctgggaataattatagccctgtctgttaacattatcaccaacgctgtcctgattgttattgtagtaaccattagttgcatattttacaacagaaatatgatgttttttttcaggatctgcaatcgtttcattctgagttgccgtcgcatcaataaaaccgtttaccgccgttttcagagcatctattttactcacatttacttctctgcgcgtgtagaactgaatatgagtagtatcattatcatttcgagtttttggttctaccgtaacaccgtttaattcccaatggtcaaattcctcccaccaaagggcacctgtcgttactgctttgatttcctcgtactcgccatttgcattcagcgcataataggttccgttttcattgacattataggtttcctcgtaaacatcagttgttcccatactatcattcattgatccggatacatcaagtacaagcacaatatccaatggtactgatgttgtcatgctcgtattggacgtagaagacaatgccgacaatccaaccatgaaatcggattcttctggttttgtaattggaatcggtgatcctgtatctccaattcccggaagtataacactatcgttatatacagacttgtctgtccagatacgtccaatattctctgtagtatactgaacaagggacttccatccctggctggtatctgcatctacaacagagtttgtatcaaatgctgctatcggttctgcctgatctcccgtgaagaaatccgcgattccctctcccacatctgagatgaaattctttgccttactgaagaaattcacctgttcgtcttgtccctgagtttccacatctgcagcatagacctgtccaataccttctggtaccatgccaagcatcataaaaacaacgagaagaatcgccaacactgagcgtagtttcttactattttcctttttccccatagtactttctttcctttcttacttatttacacagttattctcatttacccatgcatctatctatataaaatcaatggtgtatttaatattgttttattcattttctcaccccacttacgtgtttttattaaaataaagcaaaatacacccatcatctgagtagtatataaaaatatatgtgattgaagtgtgactaatctgttgctttttgtgccagattttttaattttttcagatttttcacacgaatctcagtatatgaaaaatcggtttgttgctgaaaatttaataaattcagcaacaaaccgattctgattattttctaattatctatattcaaatcatatccattgataagtgcatttgtttcctctgcccacgaatattcaaccatatacccccccccgggtacatatcttttgtcccatagacattcccgttcccgatactgcagtttcttctatccatgtataataatcacactctacactatcataattaacccaacaaacagctcgctttttgataaatacgtcctttatatcatataaacggaatatcttgttcagatccataacagctttgcggtacagatttttcaccctttcatcatacaaacgattctcccataacttatcgatggcttcctccatcgatacgattcctcctttattatccacacataaagcaagtagttcttttgcctttttattggaaaaccttatcaattgtccattaataaagagatcaaatcgtccaaacgtccgaatatatactgctttcttctgccgatgtgaaagaagtcttgcattttccattgtccatgtcagatcttctatcgtataaggcttaatcaaatagtcatctgtttttatgcggagcgcctccaatgtatattctgtatgctccgtaaaaaatacaagaacaattttcggattgatttcccgtaacttttctccaagccagagtcctccgataccatttaactcaatatttataaaggtaacctccaccttatggctagaaacatatttcaaagtatcttcggcattgttaaatttcccacacaactctacatatgaaaattgtttacattgctcctcaaaaagccgtattgcttcttcgtcataatctgcaataataactttcataatgatcacttcatctttctttttatctaacaaacatttaatttttttatattatatcacaagtttttcacttatgatcatgttaattagacattataatgatttgtggagattattacattcccgatataactctgctatgacttctttttcatcttgtgatacagctccaaagaagatataataaatctatatttacttattattcaaattcgggaaagggaaatcttgttgccatatgaaaaccgggaatgaactgtcgtctttagccaaaacaatacagcaatttacctcaaataacagggcttccatagccattaagcgatttcctacagggatgaagcatttagatgctgcactcggtggcggactcagtgcaggattatatattctgggagccattcctaaccttggcaaatctacatttgtattacaaatcgcacagaatctttctgcttctggtgttcctgtgctctttttctctatggaaatgcccaaaaatcgtattgcttcaaaagcaatcagtcgacaattataccttgaatccggaaatccaaaattttcttcagacatgttattaaatgagcacgaaacaaagaacccttttttgtgggaacaaatagagaaagttcgggaaaaggtatccgcagattgtcagaatctatacattatcgagcgttccaacaccatttgttctgcagaagacattgaaaaaattgtcctcgcacagatgaaactgctgcctgcaaatcaaaaaccggtcgttattgtagattatctgcagattctttccggagattctaacagtcgatttgtcagtgacaaatctattgtagatgccaacattcgtgtctttaccagacttgctgccgaacagcatttaccggtccttgttgtcagtgcattcaatcgttcaaactatcgatatgaggtttccatggaatcctttaaagaatccggatctattgaatattccgcagatgttatactcggaatgcagctcagtgcgattcgaaaaaaagaatttgacatcaataaggaaaaagcaaaaacgcctcgtgacattgatattgtcatattaaaacagcgatatggaagcagtggagatacgattccgctgcaatactttcctgccaatgactattttaaagaagtaggggaaaccaacgattttctgacgatatattcacaccttccagaaaggatttttgactaatgtctcttgatatattttcaataaataacaccaaaatagcaaactgcatccgaaaagaatccaatttgcccgcaacacgcaacgtcatcacaatcagtaaccgcaaagcaaaggataaagtccgaagtcagtttatcctttcacaggatctttcatattttgaaatgaccgttgccgatgccatctattcgatttatttacagggagataaaaagttcacatcgcgaaagattcttatgatgatgaccggtgatgagaatatttcccttccaaaagaacgaaaaaaacaactggaaacagtgattgaaaaattatgtctcacaaaaattgatattttttgtccacaggaagcaaacgacaagatcaatgaccgatataaaggagctttcctttctgtcgtaaaagaaaaaaatggctttcgcttttcccaaaaacgtccgctcccgttatacgcatacggggaagacaaaaaacaaatgatcacgattccacgttttcttttaaatgtacctgccttgtcaaatacgaacgaaaatattcttctaaaacaatatctcattcacgaattggaattggttcgcaataaaagaaataacgtatccgaaaaaacatttcgtatattagattataaacacacacaattactttctgctctggaaatcaatttatccgatttttcttccgtcggagctcgaaataaaaaaataaaagaaatttataaaaaagtacagtacatttttgaatactggtcttccgaagaacaaaccggttacctgactactccggttgaattccatgatgaagatttttcagtttacgtttctcaggatatgctctgtccggatccaatgaaatttcaaaaataatactctttatcaagcttcgaacgaagagcttttctcttcttttgaagctttttcatatttttcaaattccatttttcatatttattttcaaaaccgtttattatatgattattagatttattttattgtattttagaataaatctatgaatccattatttctatcattccaaaatcctcttgttttcagctgaacattcttattttcatatcctatatgttttatgtttgtttatgtttttctacgaagaaatacaacaaaaaataaatttgcacttcgtgcaacgagtgaacatatgaaatagaaacttaatataactaacttaaatcatgcgccaagcgcatgcgagtgacttttcgaaacaaaaacagttcctttcaacaaaaaataaatcaaaataggaaggtggtacttttatgaacccatgtattattaaagaaacaacaaacggatattccagctacagaattgaagatcaaatgctggccgaacgcaaaattgtctgtattggaacaatcaatgcagacagcgtaaactctatgattttacagctcatgcatttggaagcggaagatccgaacaaagaaatcacaatctatatcaacagccctggcggtgaagtcacaagtggtcttgcgctgtatgatgtaatgaatgcactttcctgtcccatccacacggtctgtgtcggcatggctgccagtatgggcgcactcatctttgcagccggaaacaaacgagccatgctccctcacagtaagattatgatccatgatccattgactacagggatccgtggaagtgctctggaagtccggcagctcagcgaaaaccttatgaaaactcgccagttagccgctgagattttagcaaaacatactggaaaaacaattgatgaagtcctgaaaaaaacatcttccgactgctattttaccgcagaggaagcaattgatttcggacttgcagattctataatgaaaaaaataaataacgtaaaggagaaaaacaatgaataacacaacaagaattctggcagaaaatgtaatcatgagcaataatacccgagaaacaggaatcaacaacaacgacttgatcatcggcccctccggtgccggaaaaacccgcggatatgtaattccaaatatcctgaacacagaagaaagtcttattatagccgacacaaaaggaaatctacgctgccaacttgaaacacaactaaaacaaaaggggtttcatgtcctggatattgactttaaaaatatccagaacagcctttacggatacaatccacttcattgtgttcgaaagaataaaacaaattccggatacaatgaacaagatatcataaccatctcacatatactttgtcctatcagaacacaaaaagatcccttttgggaagaatctgctcaaatgtatctccaatgtctgatttcctatgttctgaaatgtcttccgccagaagaacatcatttagattccgtaagtaaacttgctgatcgcattggaactactttatttaatgagctcatggaagaagttgctgacgtagatccagattgctttacagcacgccgctacagacagatccgttccaatcagacggccgatcgaatggacgcaagtatcaaaggattcatctacagcgctctaaatgcattctccacagaagatatctgttcattctttacaaagaaaaaaagcatcgatctaaaaaggatcggaagagaaaaaacggttgtctttctggaaatcagcgacactgaccgctccagggatgcgcttgtgaaccttttctacactcaggcctttcaggctctctgtgaagaagctgatagccgggttcctcattgcagattaaaagtgcctgtacgctttattctggatgactttgcaaccaatacgattatccctcattttgataatcttatttccgtgattcgttcccgtgaaatctccgtcagcctcattgtccagagcctctctcaattagagtcactctacggttcttatgcgagtcagacaattattaataactgtgataatatgctgtatctcggaggatcagatatcaaaacagcccaatatatcgcattgaaactaaataaaacagtctttacaatcctgtcacttccaaatgacagcgctttcctgttcactcgcggccaaaagccacagaaagtgcaaaagtgttgtcccgaaaaatacctacagccaaattcacaaaaggagtacaacttatgaatcaaagaaaatatacaatacaaggagttgaattattaccattggctcaacgattgaaaaatgcacagcaactccatgtaacagacttgcgttccatagaagcccgtatcagagaaacggcatcctgccaattaaagaagtattttctgtctgaaaaaaactgcaagctttttataaaagaaatgtttcttctgggaaatatcacaatttccccaactgatacttataccactgctgcccggcacattgattacctgtttcaatccggtcgtgtctcacaaggagtacatcttatccttatattcctgcatccagtctgggctataaagtcaaaatataaatcgacttctgctcattatctgttacagcagtctgatatcaggcagtttatcctatttttagatgattataatcttgctctggatgcaatgttttctgatcctgaagacagtttactgcgtcattcaagttcttttaactacaaatccagcctattgccaaccattgcttttcatgaactaaaccgcctactgaagtgcaaaaacaatattgaaaaagcacaggaagcttccggggcaaaatcatcttttcttgattgggaacatgtagagaaatatcccatagcaaattcagaaatttatgtgcttgaccctgatcgaatcaaagaagcctatcaattactaaaacaaatcttcattgatccatattgtcgcctgtgggaacaagaacacaaaaatatgttagaaaataataaataaaataaaggagtaacccattatgaataaagtaatcgtatccggccgtttaacaaaaaaccctgaaatttatcactcaaataaaagcacaaattccattgttgcaaaatatacacttgctgtaaacaactaccttcagcacaaaggaaaaaccagttttctcacctgtgtcacatttggcaaatcagctgaatttgcggaaaggtacttgcgcaaaggaataaaaatagaagtaaccggaaggctccagaccggcagttatgtaaatcaggaagggcgtacaatttatacaacagacattattgtagaaagccaggaattttcagaaagcaaatctacagttgttaatcataataaaaccacctcttccattccaacagatgaaaacgactttatgaatatccctgatggagtgattgacgaattaccattctaaaggcagacagcttttgataaaacagaagattttattcaaaaaaagaggacagcagttcattaccattccaactactgtcctcttcctgtttaaaaattcacatatccctgcagccagatctcacctttaaaccgtctgccaatctcaggctctcccaaaacttcttttctgggaacacaaatatcaaattccaattcattgacatccagcttcatctgataaagtttttctccggttaatgtattctcccgttctctgatcgccagaatttctcccataatagaatagaggtcacattccaccccataaggcataaaataactgtcaacgattgaatatacatcttccgtagcaagcctgcgcgaaacttttgagtaggtatccatatcatccagggtcaacgtttcaattgctccctgatctccattgcgtgcagcactcaaaagttgctttcgcatctttccttcttctcttgcagaacgcatctgcatttcgctttttcttaccggcagcaaaattctgccagacagagcaagaccggaaaaagtgacgccgtttggagctccagtcatcataccaagctgacgttccttcatatactctacaccgttttgcatagtaaagatcagactgatcccaactctggcatcttcacagattcccacatactgctccctctcgattcgcttttcaatagaaacctctgcgtaggtcgttacaccactcccctgaaaatacgggaagtagtattccatatcaaatctgtcatcctcacccagttctccgcatagtgtaattccaacatcctgaccgtattccttctgaaattcacagtaatctgcttcgtcattgtaggaaacggtcagctgatgggtaaagttgtctcttgtctgctccaatatttcttttagctctgcctttttcttgatgggttcaaacccgattgctttcaaatactgatgcatattactccttatttctgaggtttgattacttcatttccacccatatatggacgtaatgcttccggaatcttcacagaaccatctgcctgaagattgttctccaggaatgcgatcaacattctcggtggtgcaactactgtgttattcagggtgtgtgcaaagtattttccatctgctccttttacgcggataccaagtcttctcgcctgtgcatctcccagatttgaacagcttcctacctcaaagtatttctgctgtcttggagaccacgcctctacatctacagattttactttcagatctgccagatctccggagcagcactccagtgtacgaaccgggatatccatagaacggaacagatctactgtatttttccataatttttcataccagtccatactttcttccggtttacatacaacgatcatttcctgtttttcaaactggtggatacggtatactccacgttcctcaattccgtgcgcgcctttttcttttctgaagcatggggagtaacttgtcaatgtctgtggaagctgctcttccggaagcagtgtgtcgataaatttaccgatcatagaatgttcacttgttccgatcagatagagatcttctccttcaatcttatacatcattgcatccatttctgcaaaactcataactcctgttacgacattgcttcggatcataaatggtggaatgcaatacgtgaatcctctgttgatcataaaatctcttgcataggaaatcactgcagaatgcaatcgtgcaatatctcccatcaaataataaaatccatttcccgctacttttcttgcactgtccagatcaattccattgaatctttccataatctctgtatgatacggtacttcaaagtctggaacaacaggttctccaaaacgctccaattccacattttcgctgtcatcttttccaattggcacagatggatcaatgatgttcggaattgtcatcatgatttttttgattttttcttctacttctttctcttctgcagaaagtgtttccatcttatctgcgctttctgttacttttcttttcagctcttctgcttcttcttttctaccctgagccatcatcgcaccaatctgcttagatgttttatttttttctgctctgagtgcttccacttctcctttgatctcgcggtttctctgatccagttccagtacttcatctaccagcggcaatttagaatcctgaaatttatttctaatattttgttttacaacttccggatttgatcttacaaatttgatatctaacataattttcctcctcattcagtgtgtatcactgtttcattgcttttttcagggactctcgttcttcttctccgagctccatataactttcaccttttacaatttcctttatataggtataacagccctctcggctgtgtattgcatttaatatccatccactattattttcatccaacattgtcagaacgaagcttagatttcctcccatctcctgaaacgcatcatatcgcacaatccctatcttttgataatgattttttccttttctataaattgcttcaatctcttttttgttctgctttactgtacgctccagtttttctaccgttttaaattgctccaaaaatcctctttccagagattttccatctttgcctcgcataaaaatctgatattttgcctgcattcgtttatatttcatttggaggttgatcacaattccaattaaaaacacctgcagaatcaacaaaataatcaccagatatagcaatacttttgtttccattctcatgtctccttcttacgtctgcgggacacctcttagctttgaatggacatgatcaagtcgaatagtctttccaattcttcctctgaataatattcgatttctattttccccttaccattcgattttggattcacatttacctttgtccccatgattcccttcattttttcttccaggttttcatagataaatgtatgctcaattttttctttttttacagtctttttaggatttttcaacgttttgatcagcttctcagtctccctcacactgagtttctcatcaaatattttatttgcaattgtatactgttgttcttcatcctctaatgcaagcaatgttctggcatgccctgttgagatcatatcatcaatcaccatctgctgaaccttgctgttaagttttaaaagacgcattgaatttgtcactgccgttctactttttgaaacgcgttctgcaatctcatcctgttttaaatgaaactcttgtagtaagcgtttatacgcaattgcctcttcaattggattcaaattttctctctgaatattttcaatcaaagaaatttccacaacttcctgttccgtgtattcacgaaccaataccggcacttctttcaacccggccaacttggctgctctccatcttctttcacctgcaatgatttcataatagtcatttttcttttgtaccagaagtggctgaaggactccaaattgtttgatggaatctgctaattcaagaagagcatcttcatcaaaatcttttcttggctgttcacggttcggttcaacttgtgtgatttttaccatggtctctcccagtttttccgcttttattttttctttttcgaccttgtttaccggtttctccactgcttttattgtcttattaggaatcagactatccaacccttttccaagtccatttctttttactgccatttctattcttctcctttattgatcacttcttctgcaagcagtaaataactttctgctcctgaagatttcgggtcatataaatttattggcataccataacttggcgcttctgccaatctgacatttctcggaataatcgttttataaatattctgatccaaattatctttcacattttctactacttgcagtgaaagattcgttctggcatcatacattgtaaatacaacaccttctatttttaattctggattcaatctttcctgcacaagttcaatcgtatggatcaactgactcaatccctccaatgcgtaatactcacattgaatcggaacaagcactgaatttgctgtggtcattgcgttaattgtaagcatgctcaatgccggaggacaatctataataatatagtcatatttgtcctttactttctcaacttcatttttaataatgtattctttgttatcgacaccaatcaattcaatttctgctgccgataaattaacattagacggaagtacatccaggttttcatagacttctttgcaaatacattcttcaatcccaatgtttccaatgatcaaatcatatactgtattttcaacttcatctttatttacacttaatccacttgtcatatttccctgtggatccatgtcaagcgcaagaactttctgtccaagacttgccagtgaagctgataaattgatagctgtcgtagtttttcctactccacctttttgatttgcaatcgctataattcttcccatattcgtactcctttcattgaacactttcttattatatcaccttttacttttattatctatacaatgtttcacgtgaaacattgcgatttttcataattttgtttaaaacattgcgtgttcaatgtccattcttcagtccaaaatgtttcacgtgaaacattttaaatacaattagtattttcagttttctattccatatacatctaatatctcttttcaacttcctgcatctatattcttattaaattcaagcctgtagaaattttcaaattttctttatttgacacctctcctgtagtataataaattgtataaataaaatccataaaggagggtattcttttgaactggaaaaaaaaattaaaaacttgtacaatcctgacaggattaacaattgcttcgatgcacgttgttaatcgcttcgtttactatatgtctacaatagatgaaatgctgtctgacaaaaatgcggaatactatgactggcgtttcggaaggatctgctatcataaagtaggaactggtaatccaattcttttggttcatgatttaaatgtatgctgttcttcttatgaatggaatcaagtgataggagaattatctaaaacaaacactgtatacacaattgacttgttaggatgtggactatccgataaaccaaatattacttatacaaactatctctatgtccaactgatcacggatttcatcaaacatatcatcggtaaaaaaacggatgttattgcaatgggcgcatccggatcttttgttttgatggcatccgccaatgatcgctcaattattgacaaggtgattttgattaatcctgaagatttgattgatctttccaaaataccaaccaaacgcacaaaactgattcagcattgtatcaatatgcctgtcataggaacttttctttacaatctgaagtttaataaacgaaccatcgaaagaggacttcgattgaatggatattataattgcgggctgatagatcaaaatacgatcaacactttttttgaagcttcacaccgtgataatattgccggaaaatatttatattccagtatcaaatccagatttacaaatgcaaatgttatttattctttaaacagaattaacaacagtgtgtttattattgttggcaatggaaatcctgaatatgcgctaattgcaaatcaatatcaaaattatatgccttctatagaaatccagggaattgatcataccaaacgatttccacatatagaagattccaaaacattcttagaacaggttgaaattttctttgatatcaacagcgaagaggagttatccacagaataatgtggataactcctcttttttggtggaaaacctgtgaataacgtaaaaaaaagatgtaaagttttaaattgttgtacaattaaaacactttacatctttttggtttactttttcatttttacgaaactatttttttatttcttttgctttttatgccaatggttcctttgccggaagccctgcttttcttgggtatttttttcgtgtctcagaaatcttttttattttcacaaaggaacgtccgatttctgtatccggaagctgaaactttactgttttctctatttttcctcccaggatcgatactgctttttctgattgttttaattcttcttctaccgttcctgacttataggatacaaacaaacctcctacacgtacatatgggatacaatattcacttaacgttgaaagatttgccacagcacgtgacacacacagatcaaactgctctctatatgttggctgttttgcaaaatcctcagctcttccgtgaagtgtttccacattttccaaccctaatttttctatcacagcatccaaaaaatggattcgtttcttaagagaatccaacagcacaactttcagatgaggaaatgcaatcttcaacggaagtcccggaaatccggcgcctgttccaatatcaatcacagaattcacctggctgatatccacggtttttacaattgccagactgtccacaaaatgtttttcatttacttcatcatactccgtgatcccggtcagattcattaccttattccactccaccaaaagttcataatactgatgaaactgctctttctgcctttctgtcagctggatatccagctggtttaactgctgttcgaatttattttccatatactctcctgttttcactttttctatctgctctctaaatataccagcaaaacggatatatctgccggggataccccggaaatacgagatgcctgaccaatggatgccggccggatctgcgataatttttgttttgcttccaatcgcagactctgtacctcttcataatcaatgtctgccggaattcgctttttctccagttttttaaattgttctacctgttttttctgtcgtttgatatatccttcatacttaatattgatattcacctgctctacaacgtcgtatttgagctctggacgcattttatccacagaggcgagtatttcatagttcagctcaggacgacggattaaatcggcaagagacgcgcctgacacgagtggtgtacttccatatgcctccaaaagctcctgcacttcttttgtggttcccacatgtacactttctacacgttcaatttctttttgaatctgctcttctttcttcaaaagctcctgataacgttcctctccgatcagtcctgcttcgtatccgatcttggttaatctcagatcggcattatcctgtcttaaaagcaaacggtattctgctctggaagtcatcattcgatatggttcatgactttcttttgtaaccagatcgtcgatcagtactccgatatatccctccgaacggtcaatgataatgccatctttcccctgcagtttccttgctgcattgattcctgctatcaatccctgtgccgccgcctcttcataaccggaacttccgttaaactgaccgccgctgaataacccttcgacatgtttaaactccagcgtactctttaactgccttgcatcaatgcagtcatactcgatagcatacgcatttctcacaatttttgcatgttccagaccgggcacactccgatacattgcatactgtacatcttccggcagtgaacttgacattcctcctacatacatttcattcgtatcaagaccttccggctcaataaatacctgatgtcggttcttatctgcaaattttactactttatcttcaattgacgggcaatatcttggacctgttccctcgatcatacctgaaaacaatggagaacgatccagattcttccggatgatctcatgcgttttttcatttgtataagtcagccagcaagatacctgctctctctgaatctcctctggatccgttgtaaaagaaaacggtacgattctctcgtctcccttttgctcttccattttactgaaatcaatgcttctcttatcaatccgcgccggtgttcctgttttaaagcggtacatttcaattccaagtgctttgagactgtctgtcagataatttgccggctgcagtccgttcggtccggtctgcatactcacatctccgtagatacatcttgctttcaaataagttcctgtacacagcacaactgccttacagcgataagttgctccagaatacgttcggacacctgtaatatgccttttcccctccgaatcctcttctgcaagaatctctgtaacttccatctgtttgatttccagattttcctggttttcaagcacttttcgcatagttttactgtaattggccttatctgcctgtgcacgcagagaatgtacggcaggtcctttggaactgttgagcatttttgactgaataaacgtctggtcaatcacctttcccatctcaccgcctaatgcatctacctcttttacaagatgccctttggaacttcctccaatattcggattacagggcatcaacgcaatgctgtctacactcactgtaaacatcactgtctgaaaccccatcctggcacatgcaagtgccgcctcgcagcctgcatgtcctgcacctacgattaccacatcatattcatctttattttcccatacagaatttgctgaatatttcattgactaaatcttctcctatcgtttctcctgtaatacttccgagggattcatatgcatccataagatcaatggaataaaaatcctccggcatttgattttcaatactctctattaccttctgcaaactttctcttgcagactcaagcgctgctttctgcctgatatttgtaatataaatctcatcattaaatgacagatttcctttcaaaaacatcttttccagtgtctcttccaactcctggattcccaattcctcttttgccgaaatctcaatcattggaatctgttttccctgaagatgtgtctccagcatttctcttgaaacaactgttgtcaggtcagttttatttaacaggataattgtctttttatcaagtaccagatttagaattttcgcatcattttcatccagcggccgggatgcatccaccacataaatgatcaagtccgcattttgggcatattcctttgccttctcaacccccatcttttcaatgatatcttctgtctcccgaattcctgctgtatctataatatttaaactcagaccctgcagatggatctgttcttccagtacgtctcttgtcgtgccttcaatatctgttacaattgcccgttccctcccggaaagcgcatttaacagagaagattttcctgcatttggctttccaacgattaccgtctggataccctcttttaaaatttttccatcatcagacgatcgaatgagctgatccagctctttcaaaagtccctctgttacggactgtaatgtctctccatacccatccacactgatatgttctggatcatccaatgccgtctcaataaatgctgtatgatacaagatttcttttctcactgcttcaatctttcgtttcacacttcccttgagctgactcatagaacttttcaatgcatattcattctgagatgtgatcacatcgattactgcctctgcctgagaaagatccatttttccatttaaaaatgcacgcttggtaaactctccgggttctgccggtctggccccgtttttgatcacggtttccaaaacacgtcttacaacaaaagttcctccatgacaattaatctctacggtatcctctcccgtaaaagttctgggagctctcatcacactgaccagtacctcatccacagtctcattctgatctttgataaatccataatgaatagtgtgactttctgtccgggacagcttctcttttcccttataaattcggtctataattgtaaatgcctcttctccactgatacgtacgattccgattcccgaattcgtcatcccagttgaaatcgctgcaatggtatcttttttcatcttctacctcttggaatttctgctttatttgataaaaaaggacgttgttacacttcacgaaagcctccgtgaagcgcaaaacgtcctctttcgcttcatatttatattatttttttaaagttacaactacttttctgtaaggttcctctccctcactgtgagttgtcacgtgcggatctgactgaagtgtagcatgaataattcttctttcatatggattcattggctccagagaaaccgctcttcttgttcttttcactttgaacgcaatgttttttgcaagatgtttcaatgtttcttctcttcttgctctataattttctgtatcaagtttaacccttacgtatccttcctgatgtttgttcgcaacacgatttgcaagatactgaagtgcatccagagtctgacctctctttccgatcagaattcccatattgctgcccttcatctctacactgagagctccttcagaatctatttctgaaacgatctccacatccatatccattgcttttaatgtatcattcaggaatgcttccacagcttttattgcctcttcagaaacttctgccagttcggttgctttctttcgtaccggctcttcgtctttttcttctgatttttcctgtaccggttccacaatctgttttctttcaacatgtggttttactgtttcttcagctggtgtaacttcttccttaatttcttctacaggttctggctttctgcgtgcctcaattaccgcctgtttcatgccaatgccaagaaaacctgcactccccttttcaatgacttcatattccagtctgtcactggtaactcccaactggatcaatgcttctgtaattgcatcatccactgtttttgctgatactctgatactaccgtccatcgtgaatccttcctttccccgattctctatttctcgctctcttccgtttgattcttggcgctttgtccactgttataacggcttaccatatttgcctttgatgcgagacttccaggtttggcattcttaatactctcctttgcctgctggatctttgcttctttttctttgttggaaacacttgtcttttgttctgttacatttcgagtgctctttgtcgccatccggttgatttcctgagccggagcaccctttttctcacgctttttcgccgctttcttacgctgctcctcaatcatctcttccactgactttttactcaggtatttgttgattgccaactgctgtacacatcttacaattgcactaattgcccagtacagaccaagacctgccggaagtgtaaatcccataaatacagaaaataatggcataatataattcatagaattcatagattttgccatcgggttgtccgaatctaccgttgttccctgctgttgctgcatcaattttacactgataaactgtgtcagaccggccataacaggaataattaccgccagaataattccaacaactgaaaaatctttcaaagcatccatcagcatcgtcaacggctgttctccgatgttaatgccaaggaatgtattcaaatgtcccattgtttctgttgttttttctacaacagcttccagagacggcattttatctaccagggtattccatgtggaatcctgaaatttatataacactcgtaccagaatattcgggtctgtatagtcatatgcgtttgccggcatataaaccggtgctgcatttccgattttttccagaatcttctgatacccatctgttgccataatctgatttacaacaggcatatagatatctttaataccatttacatatctcggtacttcctgaataacaggatacagcgcaaacaaaatcggaagctggatcaacatcggaagacatccgcctgtcggagaagttccgtatttttcgtagatcaactgctgttcttcctgcatctttaacatcgatgcctgatctctttttcctgcatattttttctgcagtttttgaatttccggcatcattacagactgcatttttgagtatttctgctgtttgatcgtcagcggaatcatcaatgtgtaaataataattgtaaacagaataatacatattccgatattctgaattccaaataaatccagaaaattatagattgcatccatgatttttccaaatacccatgcaatctgtccgacaatcggccagtctgccgctgtcgcagcgattaaaccaaattccatcttttatcctccttaaggtaccggatcgtatccgccttttgcaaacggattgcagcgcagaatcctccaaacagtcagggcaagcccttttactgcaccatatttttcaatcgcctcaattccgtattgggaacaggtcggcgtataaatacagtgatatgtcgtcttcaaaccggataaatacttctgataaaatcgtatcatccttattaaaattttcttcatctgcgtcacttcccttgaaattatgcatatatattatgaagttttcccaggtggatgagtgcgccttctatatcacgatactttttttcttttgcgcttactcttgcaattacaactaagtcaaatccacattggaaatgttcttcttgaagtcgataactctctcgaatgagccttgtaagatgatgtctcacaacgctgtttcctacttttttactaacggaaatccccaaacgattcttctccaatccattctctctgatataaagtaccagatatcgattggcataggattttccatttttatatacaacttgaaaatctttatttttctttaaagattcggaaaatttcatcgataacctcttttggcagctgtttctatcgcaaatactgctcttttttataccctttggtgtagtctataccgataccaggctgactctgtctgataaagtatagaagaaaaggccacatatatgcggcctaagctgataactgttttcttccttttgctcttctggcagctaaaacttttcttccgcctggtgtgctcattcttgctctgaatccgtgaactttcgctctagatcttttctttggctgaaatgtcattttcattggtacatacacctccttgtggttgatatacttattataaagtatttacaatatttgtctctttttttcgtatccctactatatatagtgtttatatagtattcctgctgataaacagaaagacactgctcttaattatatgcaaaaaagcccgtaaagtcaagcattagcggagaaaatactaaaatatagttttccacacatattttttagaaatttttttattactccacttttccacatatattttttctttttttaagttatccgatttttttcacataattatctacacgtttacattttttcttcattccgcttcatttctcctagaatcccttatatttcctgtctttttcacttttttgttttcttttcataattcgttatttttcaccaaatttcgtgtttccacattatctacatttttcttacccacaatcggaggatttatccacagttattcacagtttgtggataactttatccaaatttgtggataaaccctgaaaacgatgtagaaaaccactgtatattgtgtcgatagcttgtagaaaattttttatttctcttaaatctccccattttacaagtgtcgatagtgtttaaaaagttttccacattatcaacaaagttttccacctaccaaattgtttcctgttatttttacattgcttctatttccgttttgatgtagaatgtacttgagatactctgcttatctctcattaatattaattaggagtttaccattg
